United States Patent Application Publication US 2007/0237770 A1 - sequence listing, part 10

SEQ ID NO: 1029 - DNA, 329019 bp, Homo sapiens
  misc_feature (1)...(329019): n = A,T,C or G
tcaagtggacccaagaggcaaatgaaattactcccaatagccaaacctggaacaatctgagcaacataataaataaagtattactgggttataacccaaaatatgaaataaatatccacaagcctgtactgatataaataaaaagttattatataaataaaggaggagaatagacaaacctgctgtgcagaagaattgtagataacttacacagatatgtttcccttacggaggtggagcataagtgtgggataggcagagtgactttctttcaaagagtacaacatataaagagagagaaaaatagagataactttacagtagaaaacttgatgaacatcacctcaggcaggtgatcaatgttaacatcatgttgatagcatgtacccttgttatgatgtgatgagaacagcactgtacctctggagtctttctcccagaaacacattatccaacatggtgaaaccctatttctactaaaaatagaaaaaaaaaagaaattagccaggcttggtggtgggcgcctgtagtcccacttactcgggaggctgaggcaggagaatcgcttgaacccgggaggcagaggttgcagtgagccgagattgcaccactgcactccagcctgggcaacagagtgagactgtgtctctgaaaacaaaaaaaatcatcataataacgatgtcttaatattggttcattagttatgacaaatgtcgcatagcagtatgttaataatatggggaactgggtgtggttatatgagactctctgtactacgtttgcaacagttctgtaaatccaaaactattctctactaaaaagtttattttaaaaaagacaaaggaaaaatttataaaacagttcaagcctacaaaaaatacacaaaataacttacagacacacatgtacctgccatccaggtttaacagatattaacattttggatcatttgcttcagatatcttttgtcttttaaacaaataaaaggttgtcagtatagttaaaactattctctattttttatctcttccttcatcctgagagataatgtctcactgacgttattatctcttccatgaatattttatacttttgatacatatgtatgtatccacaaacaataatgctattgtttttgtattgatagttacataaacagtagcatatcattatttaacctttgcaaattgctctttcacaccatattggctgttaaatctatctatgttgattcgcttagatctagttcattcattttaacctctgtatagtattctccctattctaccatacaagtaaagcaccattattcatccttccactgaaggacacttagattgtgtctagtattttactattgaaaacaatgttccaattaacattcttgtttgtgtctcctggtgcatatatcaagagcttttggggtatcctccttatgaatggagttgctgggttgtggagcaggtgtatctttaaccttatggatattgccaagctgctctccaaagggtatgtactaatttattttcccaggagcagtgaatgagaatgcaattctccccattcatccttgtgaacagttggtactgtccaattgttaattttgccaaccaggttgctgagtatattttcatgcttattggacgttctggcttcttttgtgaattttatgtttatagctattgctatttttgtactggtttgcttataatgttcatatgaatacatatttaatttcttacagaggcaacacaaggttttcagctatcttagcccagcgatgtatcggagcaggctcacactgtcttacaagagacaactgtgcacaacttttcagacttctgtatccagtgaccttacattggtagctcaaattggccatggtgggaatatttctacaagggaaattgggaaactgcagatcttggctttccccaccccatagtccatgttaagcatttaccagcgtaccactatcttaacctccaccttggcccaagcatctctcacaatatgactgacttgaaaataaatcttgatctaagttggcttttcagtctgttggaactgggccttggacctctttcaggagcgatttcatcagggtttctgtaatatatgagaaattcaatatccttttgaactaatgcatcttctactctgaagtggatcactattcatttaaagcaaagtgagggtccttcggcagctcatcagtcacagtaatccaagcacagagtagaatccaagtatccagtgatcctggaactggaagggatggcaaatgtcaccccccaccacacacacccctaccatcttctcaatcttgtttctttggacaatttccacagcaggtatcagttcagtctctgcatggacattctgacgacagggatttctctcacaccacgtaactctccaagcagagactgcaaaataatactgactttttgtttcaattggaaaagaagaaaaattctttaaaataaatgaaatctgttttccttcccgttagtctagttctgcccattggcattacctggatcaagtcgaatgaccaatgggcagagctagactgatgggaaggaaaacagatttgaaaagtctaatgacttcttcaggtatttgaaaccagaaatcatatacgacctctcttaatgtctatgtgtcttaataattcctcatggatgtaggaaccagccttttccaggttcaggtccctgtggtccctgttcagttctctggttgatcaatggtactccaagaacaaatataaacaacttcattctgcagctgattctccaaattgcagagctgcagatatctgcataacttcaaaatcaccttattctgtagcctgttcatgaggccagaaatagagtttgctgctagtaaggagcctgacacaatgatgttgcatttaaaaatgtactgaagaaatgtgcaaatatattctacggaataaggttccactagaacttaatatcccaaagagaatgttttgcaggaacattctcaatgatcaattgaaggatcccttttgtgggttacctgtgaccacttccccctgccttgctgatgtttctgtttgtctttccatactcacattcttaggagaaaatatattgaaattcaaaactgctaaaaaatattttatgctatactttaagaaaccctggctgggcatggtggctcatgtctgtgatctcagcactttaggatgccaaggtgggtggatcgcttgagcccaggagtttcagacccaccggggcaacatagtgagaccttgtctctattaaaaacaaacaaacaaacagctgggtgtgatggcacactcctgtagttccagctactcaggaggctgaggtgggagccaagattgcaccactgcactccagcactccagcctgggtgacagagtgagatcgtctcaaaaaaaaaaaaaaaaaaaaaaaaaaggaaaagaaaagaaaaaaaacctctaatgtgtgaaaaatctgtattaataaaacaaattaggaagcgtttattccctgagcctggctgctgttgcctgtgttaatttatagatttattaattacttgacagagaaggcaaaagtacaaaatgtacaaccaaagtatgagatatcaaggtaccactgtcaattaaaaatcaaaaaaagaagtcatattttagagcggaatggtcaacgtcaacatgatcatttcatagaggagaaaagagagaggtgaagccacttgcacagagtcacacagctttgcagagtagggcggggtagggcagaggagcagcttgtctcttcctggcatgctgctgataaaacatctcagagctggtggcattaatcagagggaacagaaattttgatttaaccccacttttcatgtacatctatgatgcatttcaacaacgaagaagcatcttttgtactgtctgccagacagggatccttactattgatatgtttgaaagttaattacatggaggagtgaagacggcacacccatctcagagactaaccaccgcaaatgacaagtgaaaaagacagagccgttacagctatcctggtcgggtttattttcccagactaccatgtggggagttgaacatacccaccctcaggtcggggacaggctcgtgacgatgctcagggtagtggtggagccccagaagcctccagtttccattttggacccacggagatctccagggtgcctatcactcttggcccaggcctgggctttccaggaacttccccgattgatgttttactgaacgtggtgccgaaagttagtcacaggaagacattatctcagctgtctctgcgcaaatgctctctgaaacctccacgttgcttttaaagcatcatggagaaatgtagcatttatgccttgggagccagctatctatgcagagctaaaatagaaaatcttctcaagttgagtataaacagatcctcaacaagactgagactcttgttgcttgtggctgtgtggggataggaatcagctacagcatcacttgtatttttcctgcccttggggtgctctgtggagaccatgtgatgccttccacagctaatgcccctaaggaaagaccttaggcagatacacactgaaagtatacacatctgtagacagctgtgggcaaggatgttggagtttagcatctctactaactcacctaatagtaaaaacgggaagcattgtgctaacattttttttagaacagctgcaactatctaaattataatacaatcttaacaatttaacattcagatacaattatgcagaatgaagtgcacccatcttaagtgtacagtctgatgtgtttctgctaaatgcatatactagcatagccaacaccccatcaagatatagagcattgccatcacccaagaaagttctttatgcctctccctagtcatttgaaactttccctctctacccacccagggcagccatgattctgatttctagctctagatcaatcttgcctgtttttgagctttacataaatgagctaatacagtatgtactcttttggcttatacattatgctttggagactcatttatgtttttgcatggattagtagtccattcctttttactgctaagcagtattgcattgaatggatatatcatgatttgtttatccattctccttttgatttacatttgggttgttttagtttttgctattatgaacaaagcacctattgacattcccatagaagtatttttgtggaattttcatttcttttgggtaaataactagggctagacttgctggatcgtaagttagttgtatgttttaccttataagaaactgtcaaacagttgacataatgcactcttaatgaagcttattacctgtgaagtgaggtcttttaaattttttgtcttttgatttttgtcttaaattgcatcgatattagatgtgtggacattcttctgaaatatcttaaggatcagaccttgattaactgtgttattttagtagatctttaatgcttctgagttatttatacggacagctcgaaatctgaacgactcccattggaaaaccagaatgatctctttcatggatctctcccatatttttatttatcttctttaatgttttatacatacaaaaatatgtagaacatgtgttagttattaagcatacttataaaatggaaatttgtaaatccgtcactcaatccaagagtgaactcatttccaaattacaatggaaacccatgtgcctatgggcttctcatcctctccaaaggaattcacatccttcattaattcttttgctaaaacaaaagcaaaacaaaggaaaaatattattttattatttaaagcaaaaaaaattttctgtaacttttaaagttttccttgctttttaagagctttatcaaaatggtgttacgctgtgtgcgtttttgatatttgtatatttttactcagtgtgtttcaaagatctgcccatgttgtgtggggctgtagtttattcacttttgctgctaacattcctttctgcgaatacatcacaatatactgtattacttgatacttgtcaattgttgtgctgtttctcacgtttgcacttgatgtatatgatatacattacattttttggggagtctggtacatttagcagaataatttgagatgaaactgttatcaagtaaacggcgtttttaaaaaatgaaaacaagcaatcagtttctgctccaaaagagggagaacctataagatacctgagtaaaatggtataaaataaaaagtttggtgcattgtcaatgtgggtataaagcaaagactccaattaatttttgtctacatgattttatttcaaggttgaaaaaataagtttgacttgtgtatgtaaaatataatcattgaagaaatacaaatcacctcctttgtccatgtggtcaagttagagcgtaaagacaacctaaatttttgttccttttttttccctaaatattaagctatataatgatacatctcccacttcactgtttaaaataacttaatacgattgatttcctactacttcaggaaaacacaaacatttaaaaaattcacaaataaaaatcattttagtaaaaaaaaaacacacaaaaacaaatcctacaacccctacaacaacctatatacatttaaaaattctatagacctctttatgttcttggggacaaataaacaggcatatttattactaatactaaaaatacattgggtagtatttgaagattttatattagcactagccttttaaaaatcagctctaaatttttgtcttacaagtatgtattaaaaattctgaaatcaagtataatgaaattatatatcaatattcctttgcatttaactccagagtggatctgcaggaatcaagaccaacctcatgcagagaacttaagaaatatttaaaaattagtagactggactttaattcttcatgtgtagtgcctaatttttaaataatacattttaagattctaataaatttatttcactgttaaatctaggaacatccaaaactgaaactctttatttaaaaatcaagctgaatttcagttaaacaaaaccatcccatcatatgaataactttcttaggtaaaacaaggtttattttctttctatacaactgactctgaattgagctagaaatttccaaggaggaaaatgatctaggaaacaactttagaaaaaaagggctaagtttccgttatgatagcttttgacttgttttcagctcttaaaaaattatttacgaacgatggatacacgttctaatgcagaagtattttagaattagagagtaaaagaaacctactaccttcctttacatcaggtcccttcttaccatcctacccgattgtttgagacaaccacttcttatctcgacaattcacaactcttttattagctatcttaaaaaaatttattactggcatcaattagcctgagtcatgaaaccggaccacattaagggcgacacatggtccaatcactgtttgtaaaagtccacgtatttcaaactcctctctcctgccactgctgggctgtttccctctttgaggacctggtctccgcagcatttattcattagatggcagtcctaggggagtctcgctttggggaaacctctcctcctgcacattcaagaaaacaaccgcggagacttagggtcggtactggtttccagtcacttacgtagcaaacgaagcaagaggaacgtgcctgggaggacccgagacaggtgcgggtgggtttccgcagtagccgctgatcccgagtgcatgcggcgtgttcccgggtcgggaccgcagccaagggaggcttcccggccccagcctccaccccctcctcggcgccccgggacccggacacgccccccgagcttcggagacccgcagcgtgcacgcgccccggccgctccccgcagccgcccacgtggtggagccctgagctgcgcgaggccgcggagagcgctcagggcgggcggctggtccgggaggccacgccagcgcgacccagccgagtcggcccccagcccgggcccccacatttcctcccccggagggagggaggcgactctccgcgggctgccctccccagcgcccgccgcgccctctggcggccgccgcggggacgcgcccggggcacgcggcgctgcctgtctgggccccccttccggggcgcggggcccgcgaggggcggcggggtcctctctcctcgagccactctgggccgagccacacgggccgcgcccttccccctccgctccccctgagcccccaaactccgggctccacggtcgcaacgccgcgggcaccccagcctggcgtgaaagtgcccggcgtagtagcctgggggggggggtcccctttctcccaggtgcgccccttccgccacgttcgggctttccagtacgcagcgaaaaaaatgccgcatgcacgcatttatttattttgcaacagctgcaagaaacaatgaagcttttcaagaaccggggaaacgcgctttccagccgcgctgttgttgttttcaatgaacctctcccagccccgcactccccgcccacccctcccctctcctgcccacccctcccctgcctagcctttccctggctacccacccctgccccgccgagaccggaccggcggcgggggcattgtttttggagtcgggcgggaggggagggcgcgtgcggggtggccggcgcagtgcggtgggggcgggagcgggtgggcacgcgcgcgtgtctctgtgtgcgcgcgggaggcggtggggcgggagatggggggcggcgcctcgcagtctcgcgccccacgcccgggctccgctccgcacgtcttggggaacccgggctccggttttttgcgcgcgccggcctgggccgggccctcggcgcgccgctgctgcggcggtggccgctcgagtgtgcgagcgggcgcgtgtgcgcgggccagggcgcgcgcgcgcgcgcgcgagcccccagtgtgtggcagcggcggcggcggcgcggcgaggctggggctcttgtttaccagcattaactccgctgagcggaaaaaaaaagggaaaaaacccgaggaggagcgagcgcaccaggcgaactcgagagaggcgggagagcgagagggacgccgccagcgagcctgcccacggccggcgctcgcagaccctcggccccgctccccggatccccccgcgccctccacgcccctcccgcgcgggggcagctccacggcgcgcctcgcctcggctgtgaccttcagcgagccggagcccccgcgcagagcaggcggcggcgggcgggggccgggcgggggccggcgcggggcgggcggcggcgcagagccgggcggcgcggcgggagtgctgagcgcggcgcggccggcccgccgctttgtgtgtgtcctggatttgggaaggagctcgccgcggcggcggcggcgctgagggaggaggcggcggcgagcggagccaggaggaggaggaggaggagggggagccgctcattcattttgactccgcgtttctgcccctcgccggcctcgcctgtgacccggacttcggggcgatcttgcgaactgcgtcgcgccctcccgcggcggaagctcgggcgtccggccgcctcccgcgcggccagggccgggcttgtttttcctcgcctaggcagatttgggctttgccccctttctttgcagttttccccccttcctgcctctccgggtttgaaaatggaggccgacgacgccgacagtccgccccggcgcgcctcgggttcccgactccgccgagccctgggccgctgctgccggcgctgaggggccgccccgcgccgcccgccccgtccgcgcacccggagggccccggcggcgccgccttcggagtattgtttccttcgcccttgtttttggagggggagcgaagactgagtttgagacttgtttcctttcatttcctttttttcttttcttttcttttttttttttttttgagaaaggggaatttcatcccaaataaaaggaatgaagtctggctccggaggagggtccccgacctcgctgtgggggctcctgtttctctccgccgcgctctcgctctggccgacgagtggagaaagtgagtatgtgcccgccgcccgcggccactgcgggaacttttcctccgaggggctgcgccctgtttgcgaaacccgagttgccaccgtcgcagctgtcgggcccccgggctcgggagcggcggggtggggcgcagggcggctctgccgggagggaggctgcagcggacccgggacccgggctcgttcgtctggagccccgcgggccctggctccgcgcatccccgcgcgggaagggcttttctctttctccgtcctgacagcccagccgtgtttcccggctaggcgcgaggactcggtagggaagttggtgccggggcgggctccgcggttcccgggccccgcgacccgcacctcgccccttccgtgcgcacgagcctctccgcacacagcgctgatccccctgcggcgcgcaggcagcagcgacagcaccctgggccgcaccgcgtctccgctgctggggctgaccgggcagtggggagcgggcagccgcccggcccgcggggtgcgagttgccctcgaggggggaggtgccctgcggagaggccccgaagccccaggacacgtctccaagcgcccgtcgctgcctcccgtcgcccaacgtgcttttgcccctcgggctcctcgggttcctggccttgcccgtcactttggcccgctcctcgttgggttacctgcccccggcgtcccggggctgggcggtggggtgaggggaagcgctctctgggcagccccccgggaagtgcgaggccgggagtcttcctcagcttgtctcttccggggagcgccactgggtccccagttcagagggctctgggatggtctcccagtttctcccgggccgggggatggaggggtactagggccgcatccgagtgtgcgttggtgggtgtgtggtcggagccgacgtgcattccgacacacgtgctcgcagcgcggggtgtagtcgccgcctcacggggacacctagacgcccgtccctggcgagaggtgtcgtacgctgtggtttcagcgccagggtctgcggcggcgcggggagggtgttgtgttttgcgagcgcggagccctggccttggttttgttgtggtcggcgtcgtgtcgccctctcttctgccgccccgcacttcctttgtacgtagttaataagcagtgtcgctccacattcgctgtcttttgcaatctgatagcttttgttttggtggtgtcgggtgggggttagtagggaagcgcggggatgcggggagcgagaactccccccggtgtctacggccggaggaggtgggggttttattcttctgaaaaagttgaaagtgtggcttactggtacattcaagatggtagggtaatttgaacacgattaaaagtttaaatgtcgcagaactgggactgggaacggtgagggcgtgttggtgagtaatggttgccgagggtatgcaggtggtgccgattaactttgaaaaaatcacgactgagccttcacgagtgaggcggggaaggaggaggcagcggaggttgtatggccccatcaccggggcaattcagaaaggctgtttctataaacaaatccttaaacgtctggtaagaaatgagtccgcgacggaacgagagcagatcgtggttcgcgtgtttactgccgagtgggacgcggactggggccggaccttccacagatctgggctctcctgctctttgttttctaaactttcagcggactcgattgggcgaaagccttccggctccctttactaagtcgtttaggtggtggctggggggacaaaggagggtttttatctttaaaagataagtacggtttagaagacacgggagaaataatccattttgttatgttatgcagttgaactgtatagcttctctagttttgtgtttttaatgttctgaaattcaaaacagcagggatggccttcgccgacgcaggagtcgggcattttaaaataggctgtttttcttttggagcgttcttcttgaaggatattctttgtgcaagacggcgatttttgagaacacaggcaggagggagggggtgttttaatgtatgtttttactccatgataccaaagcttccccccaggatccctttacagtggttagttcctggaaacctgatgggtggtcagaaggcaccccaaatctcgattatggtttgctgaagtcttgactgactcagtacctgcccctccctccatctctgaaatgtggagaattaaaagctatgcctgtgaacgggcgttcagtttttagccgggaaggtgctagaccacttaactctgatagaaataagctgctgagccctatcagggagggcgttctttcagctgttgtctggtggagaaataaagacagggtgttggttcagttgcaggtattttgctggcgtattgagagattagagtttcctctttgagtgtgatggcagtagaaagagtgttgtttatcttagaaaacttagtttctgaagcagaggcagtcatatggatgtgtttgttttgtatcaccataatgtgaacagagcatctaaatgaaggcggttcggaggttctgagtgatagccagataatctgagggctattttgtttttaaaaagtcagcatgcactttaaatttattgtacccatctccttaaaaggattcagtcatctttctaccccaggcatcctgttgtcacagaaatgtaggtatgtgaaatgttggtgtttaaagaagttagtgttttattaccagaaggagaacccagaaaaagaacttctgaaagaacctaaacagcaaattatagtttagatcctctggagagacatagcaagcaaatggtgttttgtggaagggtggggtttgtgtcaggatttgaaatgtaaaaggtcataatgtttgatttgtcgaaaaagattagaaaagttcaactctaagaaatatgctaaggttgaatagatgaagcttaaaaatatcacaaaaagtgaaagaagtcagtcacaaaagaccacatatcgtatgatccggtttatgtgaaatgtctagaataaacaaatccatagaggcagaaggtagatgagtggttgccaggggctgggggcggatggaatggggagtgactgctggtgggcacagggtttctttttggggtgatgaaaattgttctaaaattagtttgtggcgatggctgcatagctctaaatatacttaaaaccattggattatatactttaaatcggggactttaatggtatgtgaattatatctcaataaaccctttttttttttttttaaagaaatgtgatcaggttgaaaataacttgttatgctaccttaaattacgttaaaattattacatacatttgacaggctgatgtctctctctcttttcatttatgagtttttcagatccgtgagttgcagcaatacaacaaactgataattgaagcttagcaacagggattcaatcccgcagtagaaatgggcaagcaggagaaaaagaatcttggttctatgtagcttcagttagggattgaggagctggatttaaaaaacacaaatgctggtggagggcagatttttgacaatagaaacctcagctgaatctgaaatgatggtttttttcaggatagagtttaggagctgagtctgaagggctgtttgtatttccagttttattatgttttccaacaaagaaagacattgctgttttaagatgttttaaacactcattttttgatatgccacattgaccacaagtggtagtaaggactgaggatgaacagaacagttcattttaatgcagtattgttgtttcttttctttgcagttttattttatttcttacatagttccagggtctgagcaggagaaagaatctttaggatgcagtagttttaggatacactgtttcaagtatacagtgatttttataaaattaaaattccttacagaacgaaaggttttaaaatgtggcaaaggcatttttgttttgaaactgtgtgcatttatccagatttaccctggcctttcaataggaaaagacctagagaataattgttgtttacatttgcttttggtctttgtctaaggcttagtttactaataaaaatgtttcctgcccttcctattgttgcaagatcagggcagtaatgaaaatcaactgtatcattttcacttgttgccttagagtttttgccaagaggaaccctcaagggacggtggtttccttttaaatctggtttcatttgttttgtaagaatgtgctgtaagaagcaactgaatccagcctgcacttattgtgcacctactgtatgaaagctgaccttgtgctactcagtgcatgaacctgcagagtcttgcatgaaaccacctttcttgaaattcagattttttttcagactcagtatagggtgcagttttcaagtagacagtagttagcattttaaaggttcttttaaaaatatttctgtagacttaggactctagtgttgttcatcagaagcctttaccctataccttttttgcctcattggtgctttccgttatattgggatgtcactgtagactgtgacatacaggtgatgttaacccatcttgactggcggcactgtcttctttataacattggatatggcaattgtgatttacaaactgcagtgttgtagttgcctttttccaaaaattaggagtcacaggtgtgtacatgaacgttgcatagcatgttttgagttgtaagaaagatggaacttatttcagaagttttctggattacatattgcttagttagctttctagaaatcaggaagcattcataatttcagggcattttataatttgtaaataacttggtgtttttaaaagcgtgagggagtaagagtgaggagacaaatcctgaaagtttttgttttttaattgtaaagcatacaagatacatttctttataggttgtgattttccccaatttgttttcaaaactcatttaaaaatcagacctagttcatggaagaggtatttgcgcctgtgggcgaacttgatttgaactgcttttcttagccagcttaggacaggtgctgagtccaggggatgagctcttctcaattgtactaaatatataatagttgcacacatgttacggatatagtttcttgatttccagtctgagatgttctgaaggaaaattctgaacactttagagacaacaaagtgcctaatgagtgatgcactctgatccctcctggaaaatggtgtttggcatcagcttagcaagaggaggttttccagttatttgtaaagatgtgatgtggctttaagtggggatgggggagggtagcagccccagtgtttgtggacattgagacctgttgacatttgggaagcataactgagttccactatttgaaaagattaaaactttgatatatgtacacatcccctcatgcctgcacccccatccccgagggtctggaaaagaattgatttgttctgaggaaggaacatatatttggaatataaaatggttagtaaacaaaggatctttaaaacaagttagattgttatctcaagagaagcatacttcctcggcatgatgttttcttttgttaaattgctttggttttatttgactcaaagtattaacaatacctttgattttgagacttttggacttttgaagactaagtttttaaatggtcaattttactcgtttgaaagtcccagataccatttttgaagatttctctccctttttttccactgatgccggctttacttatgttttattttcaaatcttaaggaaaaactgatatttccttacttgaactgagaaatagtcgttttccctccctcttttcttccacagtaaatacatgttgagtacttactggatgcagttctttaggtttagaaattatttgatactgtaaaatgtcttaccataagtttttaaagatacccgtcaaactatagatgttactgccatgtttattaaaaaaaaaaataaaacgaaacaaactagtaagcaagcttaaaatttttctttttcctgccctggactacagatttttttttcttttttttttttgagacagggtctctggtcacctaggctggaatgcagtggtgtgatcacggcttgattctgccttgacctcccaggctccagtgatcctcccaagtaggtgggactacaggcacacaccaccatgcctggctaattttttgtatttttagtacagacgaggttttgctatgttgctcaggttggactcaagcgatccactcacctcggcctcccggagggctgggatcacaggtgcgagccaccacccccagcctacaagaatttgtaaactcatagattgctcttctgttttcactggaccacaacagaaagtagtttcttttatggtgagggatgaacacctacgattgcaatataagttgttgggccttgtgtccatggagctcacttggtggttggtggtcttgaagcattcacattctttggagtagtggggcggctggctagtcacatggggaagatgtgcacacctgtggatggggccatcacacactgcagcgatagctgggcctaccttactgctcacctggctgggcacagcggctcctgcctgtaaccccagcactttgggaggccaaggtgggcagatcacttgaggtcagaagttcaagaccagcctggccaacatggtgcaccccctttctactaaaaataccagaattaaccgggcgtggtggcccgtgcctataatcccagctacgtgagaggctgaggcaggagaattgctgaaacccaggaggcagaggttgcagtgagccaagatgatgccactgcactccagcctgggtgacagagcgagactccatcacacacacaaaatacatatataaaaataaattgctcacctggtaatagtctggaaaacattttttttttgtttttttgcatattttaaagactttagaaagtagtcttgctaatccagaaagttcttgcggggaggagtttgaaactttgttttatctcactcctcagtcttagcccccttaataccataggtctctacttcagtaagagttacataatacgaatgccgtttgttcagaattgtgtatctccatccatccgtccatcgtccaaattctgcgagtttgaaatacattgttgttgctgttttgtatacttttgttcaaccattttctttttaacatggcactagctttctcaaactggctttggaattatttgtcagtttaaaaataaataccactttaaaaattactcttgacatgggagaacaaatatattttgatagttgttagagcataaatattttatagagcataacttgaaatttttcctgatacattgtgattgctttcagcttgtcctctgctgtaaaaaatatagtcgtggttagtctctgtaaagttggttattgggaatatgtgcttgattacgtaaatgagacatcaccaatttaagtcagccaaagtttagtcaatagaactttaaagaacagaagtctaatggtaattagggagagatgaatttatttgtaggagttttccccaaattcaaagcgtcttagtgacctttgataacttcctggaaaaagtaggaagcatggagagaaattccaggtaggagcccatgatccaattgactgcatcagcttacaaagtgttttctaagtcattagctattaattctgtctagattgtaaaatccctctcagttgtgtccacatttatctgtgttgtcctgtatttattctctttacctaatttccctgagtctcattttagtgggataatacacaagcttacagactcaggactttaaagagaagcacagattgccacgaaaacaaatgaacacagagaccagtagcagcagagggagatctgctgtgaggcttcccttagttctgttgtctgatttctgtggataatgagttcactgcatatgttaggtcacaacatgatatcgtgtagtcgtaggtacagaacttttgttatggtagcctttcttcgtcaggtgatacaattgggattttctttctcacatgcacctcagtaaaattttcagcaacagagattggctcaggatggaatttgttcagtttcagttctgcagcctgtccttttctggggagactcattaattgaatgttgcctttcgatctcactgagtcacttgaaatcgctcagattgacccctattccgggatccagcctggtccagtgcagacctgcattgactctgactacatgctgagttggcctctgaaccagttcctgtaccattcccttagtctgatggacttgccagctccaaatactcagaacgtgcctcttgtggtcctaggatcaagtccagggtccttagaatcaagtaatgaaacaggtccttagtaatcctgtgctgtagggatccactgttagttcctggtactccccagcatctgtgcattagcttgatggaaaggaagctgtgttatgcctgtcttcaagtttttgcttctgctgtttccatagctgagaatgtttttcctcttcactactctgctacttctccttccatcctcaatactgaatagcagaaagtgccgcttaagaacacaggaaggtcaccatagctttagtttctccttagctgccaattagttctttggtcctaaagttattaacttttctgagtcttgatagaaatgcggagacttaaaaatatttgggggagacatttctccttttctcactaaacaacagaatgaaaaccttttctaacaggtttagaaaaccaaagtcagaaaaattgtgaggaaatagaataggttttttaaattgaaataatttccaagttccaggtggatctgtaaaatagggacaagatcataactttcaaaaggcagcacgctaagtcaggtgattcctttcccccatatgccttttctgtggtttgaataggtcagagatgccatctttacatttccaagtcaaattcctcttccttcttgaaggtttttgggatttccctaacttgtatagatctactttcccattactccttttgagttcataacccacggttttgctggttgacagtgatttgtcttgttccttgcttgtaattttattaggaccatggagccaaagtggctggtttgaatctcagctcttcagtagctaagctctcaggcaaataatttaatcttcttgtgcctcagtttcctcatctgtgaaattataattttaatagaatctactttaaacattcatagaaatcaaattcgtacacatgtcaagtgcctagaatagaacctggcacctggtattaagcccttggacttcaactgctactgttcttagggttgtgacatcctcgaacagagatgttctttggatagaaatataaggcttacttgatgtttgattgtccttgccatttaaatatgttatagaacctggcacataggtgctcaataaatgtataataaaactttattttgctaaggtgtttattaacaagatggcatgttgcttattaaacagttgtgattttttttttcagtaaacgatggtcatccccctgcagtttgccttccatttcagagatctgtttattacactttctcccttaatattgtcatttgtcaatttctgctcacacctgagaggtgtccagtgtgcactttgcccatctcgcctatgcataggctccatctagtggccagaagggaaattcagcatattaggtgactgaattaatagtgccccaaggaggaagatagcgatcccaacccactctctggcttgcttcctggggactgattgcaagaaaatgtggatactacagacttctgtagaaatcactgggctacagttttggattaaggttactctactgtgtcagtgcgagctgtcctgagagaattagggtcttcctaagtgatgcagacaggcgcactgcaactccatggcagagctgttaacacctagtgtgtcttttacagttagagttttaagataattttacaggactttaataaatttaaagctccaaaatatttgagattagagattaaaaaaacactactgatttcatttggaaaaatacagcaagatttaccttccattgctctatttaaacaggtagtaacactttcattctcttctctctcccctttggctattctatgtggttaagatgctcgccagccagaaatactcacagagaataagaataaatacatccagtgttgtgttaggtcccacaccgtctatatttcgctagctaattttatgtattttgtttcatgttttattgatattttcagaatctttcttgctgagattacacaaaatatatagctggttattcagttttacgtgtcaaaagccttaaacctgtttccccatgattgccttttattatttttaattcggaaatctttgtttggctgtctgagagagaacttcagcctcccttcctcccagacattttgaacagttcaggctgtactcattcgtgtctctttgtcttggcaggtggaagcccctctgcttggaatagcaaacaatactaccagcttgccctctggcaagctcctttaagagttagctgtaatttcaccctctctctggccttgattctgcatgcagaatgattgcactgacttgagctcctgtggtctcttgctatacctcctatttgggcatctcccccatattgctttcccccaccattggggaggggaatggtaccttggttatctttgaattcccaggaggtggcccagtgcctggtgcataggaggagctgaagaaacggaagacttcttaaagggatactcgccattcactttgaagcacttctttgtacaacaaatttattttcatctgatcattgcacctctgctagccaaaacattttatcacaccagttactgctgcatggaacttgaaagcaataaaattatctttaaaatcattgtttgattaggctttttgcacattgaggtgaataaaaaaaattagaactcctggaagggtaatttgtgagtctggccttgtgtcaagatcacctcatccctgtggatggagactttgttccataagttccctatagataagatgtaatgaataattcattggcaccgatttatgtctgtagtgtgcttttaaaccctcctggagctgggttcctgaggaggaagcatctgcaggctggactcggctgcctggtggtctccggagtggcctggtgcagagggccagggtggcatctcagaaagttgggtgggtagggtacttgcacacctgctgaccttgagttacagggtggacctaggtcatttcacaggcccttccagccttcagatctcaagatactaggcagagagagagatggagatttgagggagatgtggttggaacaagcagaatcaccacgtatggaagttggcttctattttttgcattgttttcttggtgaggccagtaagcttttgcctcactcctgggagggacagtagcaaggtcttacaggtctctctatcattgaagcaccctctccaaccctgccggttttggttgctggtgaaggcctttgacagtgtcctggtagggcgacggtgaggccagctcccgacctctggacagaagaaagcttacttgtctaggttggtgtcaaggggactcctgaacttaatgaacaccttagaaattatccttaaagtctcctcttccgaggagtggggtggnnnnnnnnnnnnnnnnnnnnaatgtaaacataatcatttgaagctggaatgttaatattcaagagtagcttgtaaaaaagcatcttgtgaaattctcatgtgaatgctgaaccggctggatgtgaacttagctggacagcctggcctgtctttgctctgctcttctccgtgcggtttgcatatgtgcagggcttcctttgaagccttgtcccctcaaacaattcactgtctccctctctcccacgcatggaggcatgttggaaagggagctccaggcctcagtgtctctgcctgtgattggaataacactgctctagcagggatgccaatgagaattagcaatagataatgtatccaagctgcccagcaaacctggcaaatagaaagcatccaataaatggatgcttttctctttttttctcctcctcatggtgggtggccctggtgggctctctctggggcctccagtcctccttccccacaacactggggaattgctgccagttgaatagggccctttttttttttttttttttttgagacagtcttgctctgttgcccaggctggagtgcagtggtgcaatctccgctcactgcaacctctgccttactgcaacctcttcctcccaggttcaaacaattcttgtggatcagcttcccaagaagctgggattacaggcgtgtgccaccacgcctggctaattttttttttttctagtagagacggggtttaggcatgttggtcaggctggtctcaaactcctggcctcaagcaatccaccgacctcggcctcccatagtgctgggattacagatgtgagccactgtggctggccaaggagggtctttttttgcacatctacagtgaaaggtttgaacccggacgtctgagtctcaggtcagttgttgaaaccactaagtaaccaccttgcttctctgtgcctgaagagaatgggtttttaggttaaccaggctgactggttcaaggtcatgtccctatctgtggaaggggagtgggagtggaaggtgagtggtgacagagtatggaaccctgtttctgatatctagattatttgagggcctccagtggtctctgctccatggaaagcatatgaaagaatatgattttttttttttactcgagcttgttgtctagttgggaaaactcaactactggtggagagtaacagatgctatgagtttagtgctaagttatgggatgctgaccggagagaagtatgtgggctgcaggcagtggggtcacggaactgcagaatggcttgagaagctttaaggaggatgtctgactttagtgtgccctaaatatttgactctcaagatccaaggaggcagctccccaggagaggaagggaccatgtgtggtgtgggtggcagtgtgcactgatggagtggagagggtgtcagaatccggtgtttgtgtggtgggaaggaattgactgctggctagagaatgaggagcgctgaaacctttgcaccattgcagtggacccgctgagaagggtgttctggggaggctgctctggtctctcgatggagtcaggattgggggacagatagacaccccggtgtgagccagtgatggtatagatgagggaggcagtgaggacaggctcagggagggaagtcttgtctctagacctgagaccaggaagcaggaatggactggacaggttggcccagctgagggaggtgactggtgagatgggtcctcggtgtgaggggctgggttgccagaggagctgtgggctggggtggtttgtcgagagagcagtcccagttgatggagaggcaggacccgcaaaacaggttggctgcaggactgggggcggtagcacagggcagctcccgaggagacacctggcacttttaaggcatggaatggagagagctaggggagagcacacctgcagtgaggcaattcacatagcaaagttctccggaaactgcagtgttcaacttttttaaagaatagctggatgttagaaaagtggaggaactgtcacctttattaggggcatcatggatacctggtagcatcaagggctagggttaaaacccgtggagtaatacgccctcctattgtgttcctctcctctaaaaatgaaggtgaaactgtttcaggtgagcgctgttgttgttcgtttgctggggcactgctttctgatttttagaggagtccaggctggagactgacccctgcctttttctgagttgggccggctgggcccgaggctggttctgggctgggccaggctgatgcagtggccttgggcttcccgaggctgggagagggcggtggcccccgctaccctgaagagctggccaacgcggcagggctctttccagtccttaccatgcaagtgaagaggaacagtttgtttaaagaggggtgccagcttcacatccaggcctggactttgctactggtgcttttgaacttgtgttgatttatgtttgtaaattgactggacacattgtggttcttgatgagaagcaattgcccatccttagcccacgattagtgccactctctgggtgctgcctgttctgccactgtaactgttttcacttgacaaataacattaaaaaacacagttctgcaagagacttcctgggagggtggtatcatttggcctgtgggcttttgtaacactttcctgctattaggagagtgaattctgaattttcaatcacgttcacctgttggagcaagtagagtttcagacggtctccgcttttctcgactagaaagcaggccttctcccttttccccccagtcttgtttcatgacaccattcccctctgagatgagggttggagaattagaagtctactgatgcattgtaccggggcacgttattgaccctctctgctctcctttcctcatctgtaaaatggaagataatgccacccatcaggccgagtgcggtggctcatgcctgtaatcccagcactttgggaggccgaggtgagcggatcacctgaaatcaggagttcgagaccagcctggctaacatggtgaaaccctgtctctactaaaaatataaaaattagccaggcacagtggcatgcacctgtaatcccagctactcaggaggctgaggcaggagaatcacttgaacctgggaggtggaggttggaggttggaggttggaggttggaggttgcagtgagccaagatcgcgccactgcactccagcctgggcgagagtgagactccatgtcaaaaaaaaaaaaaaaaagtgtcacccatcttggaggatcgttaccaatacttcatgagtgaatacatacacatttcttagaacctagggtttataaacactaggagttagctgatactattgttgctaaggatagaggaaatacgcattagaagttatttacttcctttaaaaaaaaaaataccctttgggtgtgtattgattctgatgttttgctcctagctacatttgccgtttttttttgactgcagaattaggaaccagcttcatttttttttttttttttggatggaatctcgctctgtcgtccaggctggagtgtggtggcgcaatcttggctcactgcaagctccacctcccgggttcacgccattctcctgcctcagcctccccagcagctgggactacaggcgtccgctgccacactaatttttgtatttttagtagagatggggtttcaccgtgttagccaggatggtcttgatctcctgaccttgtgatccgcccacctcggcctcccaaagtgctgggattaaaggcgtgagccaccgcgcccggcaggaacccagcttcatttcttgtaaagagagtttgacaagcgctccactggggatagcagcacagcttcctccttttctgtccctgtctccctcctgactctgcatctgcctccgtttgaagcatcctcctccagtaagtgggtcatttggattccaaggcccttttgaggccatggtgatggatcatttgcgttatcaatgtgaactgtggatgtcccttcgcccttcagtctcttccttcttcaaggagggggaggtaattgggggtcatgtggcctggggaagagcctggtcacgagcatgagggatgtgagtgggactatgtttccagccaaaatttagggcacaggatctgaaaaacacttagattaagtatctgcaacacaaattagggtattttaaattgaatgtggagaaccctgagaacctgtgccctttgtgcgtggatggctgcttgcaaggatgagcatccccagctggagcggcccatggctgccagaacaggagaaggcttcagtcaggtgggaagccagctgcagtgtgttgcctgatgcaggatggtgcgagaaggagctgctctcttgctctgctccctggatcgcacaaggtcttcctgagaccagaattcaaggttagtcctgtttaggcaacttggtagatggacttgaatggtctttgctaagcgaatattgcctatggtggtatttgcaaggaaaacaaaagtgttttgagcccagactaaccaatttaacaatgctagtaggtaaggatactactgtttgctttctgtgatgagaggtctcttaggaggaggggttaattcttttgatttaaaacttactacttgaggcaaataggcacatgaaaagatgttgaaagtcactagtcattggtgaaatgtaagtcagacccacaattggtacttcatactcattagtatggctattaccaaaaacaccagatgatagcaagcataggccaggatgtggagatgttggaacccttgtgccttactggtgagactgttaaaatggcacagccttttttttttttaacaggaagatgatatggtgcttcctcaataaattcatcatagaattgccatatgatccagcaattccactttggggtatatgcccaaaaagaagtgaaagcaggggctcgaacagatatttgtacacccatgttcatggcagcaaataattcaaaatagccaaaaagtgaaagcaactcaagggtccatccatagacgggtggataaacaaaatgtggtctatccatacaatggaatatcattgagccttaaaaaggaaggaaattctatgatgtgctacaatgtctgtgaaccttgaagacactctgcgaagtgaaagaagccagtcatgaaaggacaaacagtgcataattgttacccttacgtgagctatgtagagtagtcacattcatagagacggaaagtagaatggtgaggggcggtgaatagaggctggggggagggagcaatgaggaattggtgtttaatgggtacagagtttcagtttgggaacatgtaaaagttctagaggtggatggttacggtggttgagcaacattgtgaatcagtgtcagtgaactatacacttaacaagggttaaaatgttaaattctttgttgtgtatattttaccacaattttaaaaagcttatttctcaattgtttatgcgagtatatgtgtggaatagttggggagacaaattcaaggagaccagtccttgtccatggcggtcctaggtaccacgggatcactgcgggggaactgtgaggtcaggagaggccttgaaaaaaaacgcaggtttgagctgagtcagatggaatgggtctgttttctatatcaagagacagtattgcagataatttttttctttcaaggaaagcaagtcaggagtcaaactctcatgccaccgtagtcacaaatgaaatttattgctaatcagccatgtgacgtgtaattgctttttcattttcttatttttccagaagagagatttgtttagatgtttgattccctcactgattatgattatactggaagtttttcatttgttttgacagctcaattttttttttattgtaaatggactccctcattacagaggggggagcccttgaaagaaagggattgacctctgcaggcaagaatctgagcatcctaaaagtagaaaagggctagaggcttcgccttacaggccaggaagcttggagggacgcgctgctagagaccatggcacgcatgctgtgtgtcgaaggccaggtccgcctgtctgcctctccagcagatactctctggggctatttttttctgcttggttgtcatcttttggtttaaccaggcgccagggctcaggcctggacctgctggattccaaagaagacttcgaggtggccgagcttgtctggcttccagaggagctttctctgtcccgcccgggggagtggctcaccttggtctgagaccaatgggaggaagcctgctgcgggcaactggtctgtgcctggaagttggacttgcattttctctggacctccaaagcaaacccgaatgaccactctcatcctccccttttgcttgtttgtgtatgtgcttgttttgcctggtcgtcaggcaggaggtggtgtcagatgatgagaggtgttgctcgtccctgggttggttctcttacggggctgtatggatgtcttagctcagactgctgtgacaggttactatagactgagggctaaaaccacagacttatgtttctcacagttctggaggctggaagtctgagatcaaggtgccgaccaaatttggtttctgttaagggtccatttcttggcttgcagatgacaaatgtcatgtgtcctcacagggtggagagagcaaggggctctggtctcttcctctttatgtaagggcattgttgccattatgggggctctaccctcaggacctcatctaaacctgattacctccctaaggccccaccttcagataccactgaaggtatctgggggttggggcttcagtatatgaattggaggggacacagtcatgcagttcagaacagtggagcagtgtgccatagtgaagggatctccagaccaggattctctatggaagttcttggccaggtctgagagttggttacagatcattaaaatttacatggaatccagtacttgaaagtacatgtcttcaggatggcgctgagcacattcgcctctgtaaccaaatgcctgaaatgtgtagtgcaccttctgagcaccccagtgctttccttaaagtgaatgcagtttgagaggaactcaattattgagaaattttatatgaccccatttctctcattttaggacagataagttgcttattttaaactctgcaggagctacatagaggaagttatactccaggagagcttaaatttcactctctgaaaactctgttccatgtaagtacattcctcctctctcccctcctcagtgagcacgtacccatcagatgtgtggaattctattaaaagcagctcctcgtgaccctccagggttttgtaaagctgacaccagcatcagtgagttggaaggggctgccacagaagacagacttactgctgcagcccgcttcagagccctcagtagtactttttcctctcccagcaaatccaggaggctgggaaggtgattgttaattgtttatgagcattaactgtttaccagtcatacttactattttaaatctgaccctgccattatgttgttttgtttctgttcacagctgagctttaagctgggtagaatttcgtgatgagtcactcctatgactgtaaaatcagtatcgatcaagccttcctgttcatcctgtgagcagtttagagacagatgagacaggcttatggtttccactggctcggctccgtgcgtgtgcggattgggcttcctgagagcctggttagccccttttatctgctctctgaaacctgcgcaagggtttttagcatgcaccttgaaacctctgctgcctgaagacagtgtgcttaaatgaagggtatacaaacccatgtgaggttttctcttcccttttccatgaactccaccccaattacctgtttgaattttgcatgccagttattttcagggaactagtgacccttttcttgccaccctgggctttgaattgaaggccagtgtgccaccttttctttggctttgttagaacgttgccctcagggtcatatgtgctggctgctatgaattcttactgcttgatggacagagaaaggtgagggttagatatctggacagggcatgacagggcgggtcatcgagtaggaacattgggaccttttgcttccaggcttgagcagtgggtgagaaacactgtcttcccattagggcagtgggtgaaacactgacttccctccatcctctgggcagccttgtcaggtgggtgtggaagctgaggtgtgtctgccccaggctgtgcagtcagccccgtgttctagcttcccgtgccgaacctggccctggaggctgtctgcctggcaagggggctgcacaaagctcggaggggcatttctggtgcttggtagatggtaggcctgcccccagtgcactgataagagcatgggctgagagtgccacttggattcggctacagtgggcggcagagtgggggtgactggtgttgcttttactctagagcagaggaggcagatgaggtagatcggggccccagggatgctgagctgagctgggtagagagaatttggttttgtaggatttggagacagagacaaatttggagtgtttggatgttcggggacctgcaggaggtatgtgaggtgtgtaaaatgcagcccctgttttataaagagcttacattgtctcttgagaagataaggtgtgcccagctgtggaatggaaccagatgcttttatgagtgaggatggagtgagcacactgggaaagagccctggaattggaggaagagatcattttgcccagagggatcttggaggtctcctggaggagggtacttagatgatcagaaggattatactagacttgatggggtggtcttggcatcagaactttaaaaatgtattttggggctggaagcaaggctggagaggaaggtttgtttaagttgtagtgggggatgaggctgggggcaaatcagggatggttttccaggtctgtaaaggctggggtaagaggaatggttggttcttaagagcaaaaaaaatcccttacatattggttctcttatttgtgctaagttaaatacatgggaggctactggtgtttatgaaataaccctgagcctttttggggaggtagtagtggatgtctgatggaagagatagaagactggtcccaggggttcttagtggcaccttcctctcaggtcatcactgtgcttttgcacattgcagttatatttgactacatttgattatggcagatttacttagaagggcactggaaaaaagcctcccaaattacaactgacacaggaaatgactttattttcttctattttttttctttgcttttctcccccaatcaacatacatttttaaacctgtcatctcacatgacctgccggtagaattgatatgtttaatttctgtagaaaataactggaaatatttcacaagctccagtagcttcctgttgtagggacccttaggactttggaatgagaagttttctattgagttgtcatatttggaaggataaaggtgccctcttttccctcgatccacatagtagactcctgtgtgcgggcatttgtttggtgtctcacgttgatgcaaatgcagccattgcagagtgagccccgctctgttactggatctccatttgctcaaaagagagcagtgtccccctccaaatctgcatgtctgaaagcattcatgcaggttcattgcatgggtctttgcattttacttagacttagcaaaaatcaggtatagtctttcctgaaaacaaaagtgaccattgtttttaatcaactgcagggtgtttggagttgtgaaatatttagggtcccgagtccattccagattcaacattgggaaagaatgagaaagctgaagcctggggcaggctctgtctgcagaaaccatgggctatcaccccctctccttagcagcattgtaaacaaacgtcatttgtaaggagcatgtcccaactgagcttgtaattataggggcaagatttgtgtggtggtaggggcatggagctggagactgggggcttccttattggttcatttatcctggcccttctcttttctctcaagtctcagctcttttaagattcagaaaataatgcaaaatgcctaagatttctgaaattcctggcttcagagacttgactacataaaagagccaggattttcaggctggccatttcaggatcagccatttcccacttcctgattcatagcttccaggatttgtaatgcctgtagacttttttctctcttgcttaaaagtggccattgaaagaaaaaataaatagcaaaatccccatcccagaagttctacttcctgttgttgtactattgagctctgaaaaacagctttgtaagtttaagctcttgtttggactatttcagtggaattcttgagatctttttgtttggacaggcaagtatgaaggcgataagtcgaaagaactacagcttactcagcacagaaatgcagaggctcaaatttaagttcttccttagctttatggtgtgtatattaatataatccaagcaatagtgagttgcttagccagggtgcacagacattttccacaatgccagttgtttccctcataatgtttaatgtttatttttaaaggacatatttgggcacacgtttcatttttgcctgtaaaagaattgggaatatttatgattcttgcaacaaaggagaaggatccaaagtaaccaagaaaatgatggactggcagccttcacattttcccacaactcttttcatgaaataaaatgtagataaggctgggtgccatggctcacgcctgtaatcccagcactttgggaggccgaggcgggcggatcacctgtggtcgggagtttgagaccagcctggcgagcacggcaaaaccccgtctctacgaaaaatacaatacaaaaattagccgcgtgtggtggtgtgcgcctgtagtcccagctactcgggaggctgaggtgggagaatcacttgaacctgggaggcagaggttgcagcgagacaagatggcgccattgcactccagcctgagtgacagagcaagactccatctcaaaaaaaaaaaaaaaaaaaaagtgtaggttagcaaaagtgcctacagttcaaatgcttccatgctaaacgttgtatttcttccggtctcatttgtgatgagagtcataagattttgagaaatacaaaaacctttccagctttataggatgataatggcttggccactcaagtagttctgattgggttaactaattttggtccagtaatcatttcatttggggtgaatggatttttcccccctaaatacgggtacctggaaagttgaagcagtgaatctggtgaaacttaatcagtgatttcgtaagggttaacaaatgtttctgggtgggattcctaatgtccagcttcctctgtgtagctcagtaagtcttctttggagacactagcctgcattgtaagactgtcacatgggagcatctttttattttattttacttttttttaaaaaaatgaggtctttattatcctggctggagtgcagtggtgtgatcatggctcactgtagccttgaactcctgggctcaagtgatcctcttgcctcaacctcccaagtagttgggctgatagacatgagctactgtgccacgtagcattcttggggattattgtagggtccttttggaccacacatggttttatactctgtagctgattgatgtactggcatgtcagtgacattgtgtgtatcattacactatttggttaattgatgtactggtggaatagccatcttctggaggctcttgtttgcatacttctcttagtggcggactagcggttgtacagtaaatagatgatcattctcgctctgttttacctttcctcagctgctcttctagtaggaaaataacagccctcttagctgtagtcttctggaggctctctcaataatagaagtggaaagaaaagactcaaatccctgggcagtgactttttagttgtttcatttgcttttaaggcagaaacacctttaactcttagtagccttacagatcatttttgaaaacacctgtgcttgccttgaatggggcggtgaccactggatccccccatgctgggtacatgttttgcagtcacagacactgctggcctcacctttggtggtgaaggaatgtttccaatttctgctgatggtgtagtgctcttgggagctgggtgctctgaatgagcagatgggcatctgcttttttaagcctgctgttcattctgcaaaatagttattgtgcaaatacctgataagcaccaggtctgtgccaggcgctgtattttgtattttgcatgtctgaggccagcatctttttccctgttcctttttctcctcatccagtgaactttccactgtggttgtagtttgtctgaaaaagatttggaaaaaatgtacagccatgtttctcttgtctagagaagctgtcttaaggacttcgacaagtttcattggcagagtgaatgagtggtggcctctgaatagttgaaatgttaatgctatctataggttctagagaatctgtgtctttaaaagtcatagcgataaagtctcagctttttgagagagtgggtttcagacatactactatacaggaaatctgattgttgcattgaaacaggatttgttatcacatcacggttagacatacccaaaaggcaaaaactacagtggtcatgattgctttacataagattttggaggagaaactgttagctccatgaaagcaggaactgtgttcactcttgaatgcctgctacctgcacatggtgaatgttctataaatgtatattaaagaaatggaggtccttagagttccaagatcaccgtcaatatcatcaccctaggcttcctcgtccttccagttacttcttttccagaagagtccattgcctcctttatatgaggtctacagagcgcgttcagagggctcttatcattgattcagcaatcacgtgtacacatagcactagaatgacttcacatatttgacctgtttaaaaataacgtgcagctatgacgaacagcgaacctttgattagggacacatttgcctgccgccagacactacaagtattatgtgtattgcttttttcaaattataatagtaatagatgattatgagaagaaaattagaaaataagttttctgtctctctataaaaggaaaataaaaattatccttaatctcaaggtaaccattgttaatattttgttgtgttttcctgagattttccccctagacttatatgtgtatctatatatttaaaaaaatgaaattagtagtatactatgtacacacatattgtgaatttctgcccataacattatatctttatcacctggaatgaggtctttaatgaaattattaaaattaaaattattctataaatgctaaatttaggtattttacaatttttttttttttttttttttttttgagacaaagtcttgctctgttgcccaggctggagtggactgcagtggtgcaatctcagctcacttcaacctctgcctcccaggttaaagcaattattctgcctcagcctcccgagtatttgggactacaagtgcatgccaccatgcctggcaaatttttgtatttttagtagaaacggggtttcaccatgttggccaggctggtctcaaactcctgacctcaaatgatctgcccaccttggtctcccagagtgctgggattacaggtgtgagccactgtgcctggcccattttataattttgatcattaaaaaatgatgtgataaaattattgtgtattgttgttgatacactactctgattaattctttgggctagattcctaaaagtggaaagtaaggaataagaattgtgtaagtgtgcatgatcctagataaatattgccaaaatattttgcagaaaattcttagtttcagcttccagaagcagtgtctgtcatccatactccaccagaattgaacactaaattgagctttgcaattttagcatttaaaaagttgtatcatttaatatagaatagcagtctcttcattatgatcttcccttgcctagtaagtttatactcaagtcaaaatcggttaatcatgcatattgattccttgtttatctttttcttttaattctttaatacttctagaatgtatttgtagttaagtgaagtaagatacctcctcctgttgacgatttagtttccccacattgtgctgttttttttcttcactggattatgtaacaatatcttttcttttttttctttctttctttttttttttttttttttgagagagtctcgctctgttgctcaggctggagtgcagaggtgtgatctctgttcaaagcagcctccccctccccagtccaagtgattctactgcctcagcctcttaagtagctgggattacaggcgtgcgccaccacgcctggctatttttttattgtatttttagtagagatggggtttccacatgttggcctggctggtgttgaactcccggcctcaggtgatccgcccacctcaccttcccaaagtgttgggattacagacgtgagccactgcgcccagcctagagactctattttattagtgttttttgtagacaaagtctcactctgttgcccaagctggagtgcagtggcgccatctcggctccctgcaacctccacctcccgggttcaagcaattctgcctcaacctctcgagtagctgggactacaggcatgtgccaccatgcccggctaatttttgtatttttagtagaaatggggtttcactatgttggccaggctggtcttgaaatcctgactttgcgatccgcctgcctcgacctcccaaagtgctaggattacaggcgtgagccaccgctcctggccgagactctattttaaagctgtcttctcccactgatttgccttttgtttgtggtaaaatcattttgtcttaaacactgtagcttcattatacatgttaacatctgctaggaagaatctccactcaggttaaaaaaaaaaaaatttgaagcaccattatttcaggtgaactttgtgtgtgtgtatgttgttttgtttttgcaattcttctccgctactcttccaaaaaagaaaacacaaatttattaggttttgattgttaataaatcagtttgggagaaaacatttccagatatttgaattactcattcaaggacatttcgtgtttctccatttactcaactattatctatctatgaagaaatcacagaaggtcatagaggttgtatacttttccttttgggttatttctggttaatgaatgctttttgttgctaatgtagaaggaatctttattccccattgtttattttatatttttaaattttttttcaattaaaaaaaatttttttttcattcctgagacagggtctcgctccgttacccaggctggagtgcagtggtgcggtcatgactcactgcagccttcagctcctaggctcaagtaatcctccacctcagcctcctgagtagctgggactactggtatgcgccaccatgcctggctaagttttttctttttcttttagaggcaggatcttgctgtgttgcccaggctggtctcaaactcatgacctcaagtgatcctcccaccttcacctcccaaagtgctggcattgcaggcgtgagccaccatgcctgaccttccttgtttcttttaggtgattattggttgtgtgtgaggaaagctctggtattttctgtacttatcttgtacctacccaatttgttgattgctcttattcgttataatagtctttcagttgactcttcctaatttttttgtgccgagaatcattgatgacaaataaggataatttggtctccatttttctggtacataatacgtctttacttaccatcagttgtgtgtcacttaggaatataaatggctgaaaataactgaaagcctgcctaataagggagtaggccgacaggggctgacttttctcaagttcaggcagtctggagggaaggagtctgtggctgctgtgaggtgctcaaagagggtgtgaggactgggctcctggcttctgtttgttcatccttagcctgtggcttttgtcctcgtgaacacaagatgacctccaggaattatgtctgtttcaggcaggaagaagttgagaaggaatgaagacaaaaggcaaaaaaggcagaatgacaggtcagcaagcgctgctcagccagtaggccctgcttctccttggccagaactgagttgcatgcagctggctagaaggtgggagatgaatgtgggtatggctagtgggttgggcatgggggttgggccaaccaagcatggttggtcatagggtcttgctgcattagcctgcacatccagaattgttacatgttgattacaggcatatttgtccttttttgtctatattaatgataatgcctctgtttctcaatgtgtaaggcatcttttggtttaagaggttttcatcatgttgaagaattgcctgtcttgttttcttgggtgatttattaaggatgggtgttgaatgtcatcagatgtcattttggcattcatttggattcagaagtggttgttacacctattaattgaggtaggaatagattacctagtagtaatccctcctcaaattcccgtgttaaactatttttggttgcggtgggtggctgtttaaattcctaattaaatttggtttgctaacatattcagattttttaatctcttattttaaatgagatagctttacagttctctttagatgagttcttttccagattttgctgtcaggcctagactagttttgtaaaatgaattaatgacttttcctttttaccttctctgtaacagtttttatagtgtggcaataaactgtcctttgaaggtttggaacaactcacttgttaaatgcctggaggctgacacttaaaaaaaaaaaaaagaatagtttttgttgtgtttctttttgttgttggtgttgtttttagtcttcagtgcagtggcataatcttggcccacttcagccttgacctcccaggctcaagcagtcctcccacctcagcctccctggtagccgggaccacaggtgttttgccgccacacccggctaattttttattttttttgtagtttttgtagagatggggttttgccacgttgcgcaggctggtctagcattactgggctcaagtggtccacctgccttcgcctcccaaggtggtgggattaacaggtgtgagccaccatgcctggcgtaaaaagatggttagtttttgttttgtgacagctttaaaaaaggtcttccatgggtgttggtctgttccagggttctggttctttcctctgatgctcttttttttttttttttgaaacaggatctcgctcttgtcccagatggtgtacagtggtgtggtcatggctcactgtagccccagcccactgggctccagcaagcctcccacctcagcctctggagtagctgggacccatacctggctaatttttaaatgttttttagagacagagtctcgctatgttcccatgctggttttgaactcctgggatcaagcgaccctcctcccttggcctcccaaagtgttgggattacaggcatgagccaccatgctggccttctggttctttttaaatcaattttagtaatttagtaatttccagcaagtcaattaaaaattatagctcagttgtatgtagtattttctgtgtggtgttatgccctctgtatctgttttctcagatgttttagttgcttttctctcttaatcttgattagacctgccagagctgtgcttattttgtgtccccatccaaatccagaattaattgccgtgctccacatgttttggtcaatggtggacctcatctgtaacagtagtcccatgagattataatggggctgaaaacagtgctgtcccctagggatatcgtgtctgttgtagtgcaaggcactgctcacgtgtttgtgttgatgctggtgtaagcccactgtgcttccagtcagatgaaagtgcagcgcatacaattgtgtgcggtacctaatacttgataataaacaaccatgttactggtgtatgtatttactatgctgtacttttaattgttagagtgtactccttatacttattaaacacaaaattaattgtaaaatagcctcaggcaggtccttcaggaggtatccagaagaaggcattgtgatcataggagctgatggctccgcctgggttactgcccctgtagacttccagtgggacaggatatggaggtggaagacagtgacatggatgatccggaccctttgtaggtctaggctaacgtgtgtgtttgtgtcttagcttttaacaaaaaagtttaaaaagttaaaaaaaaaagttaaaaatagaaaaaagcttatagaataagaatataaagaaaatatatacaagaaccaaaatttaagaaaaataaagtttgtaaaagtaaaaaaagttgtgcttaagctaagtttaatttattattgaagaaagaaatttttaaataaatttagtgaggcctaggtatacagtatttataaagtctacagtagtgtacagtaatgtcctcagccttcacattcactcaccactcactgactcacccgagggagcaacttccagtcctgcaagctttattcgtggtggtactcccatatacgtatgtatacttttttttttttttgagacagagtctcgctctgtcgcccaggctggagtgcagtggtgcagtctcggctcactgcaacctccacctcccaagttcacgccattctcctgcctcagcctcccgagtagctgggactacaggcgcctgccaccacgcctggctaattttttgtatttttagtggagacagcgttgcaccgtgttagccaggatggtctcaatctcctgacctcgtgatccacccacctcggcctcccaaagtgctgggattacaggcgtgagccaccgcgcctggccttttgtttcgtttttaagagacagggtctagctctgtcacccaagctggagtgcagtggcgtgattatagctcattgcagccttgaactcctgggctcaactgattctgttgtgtcaccctccccaagtagctagaactacaggctcatgccaccacacttggctaatttttgttttttaattttttgtagaaatggaatctcactatgttgcctaggctggtcttgaactcttggtgtcaagcaagtgcttggcctctgaagtgctgagattataggtgtgagcctggccatatgtactttttttttttttttttatccttcttactatatttttattgtaccttttctatgtttaggtatgtttaaatacacacatacttaccatggtgttacaactgcctgcagtattcagtgcagtaatgcactacaggtttgcaggttggtagcctaggagtaataggctatactgtatagcctaggtgtgtagtaggctataccattgaggtgtaagtatactctgatcacacaatgatgaaatcacctaactgtgcatttcttagaatgcatccctgtcattaagtgatacgtaactctgcttctttaagcctctgtagcactttggttatgttaggattctgtgtctttacaagtctgctttgctgatcgattgtgacatcttgagggcggctgcactactttctgcctgcaccttgtttcgcatgtctacctggcgcatgacatacacctcgttgttcagttcttgcttctctgcttgtgtctttgcattcaccaccagctattctgatagttatcaggaggttttcattgattgcagtctcgtgcaatgggtgcaggtaatgggtagccttatggaggagaaaatgcttacctatttgggttcattccaaggagtagttcaaggataaacctctaagtttggggagtgctgtaatttgctggatatgtgagccatagaagacagcttggatggcatctgatgcttcctggctgcagggatggaggcagcagaccctcctgcctggggtggttggttgccatccctgtcgggggctcatgctccaccctcaaggctattcttgggggagttgtgacatggctttcataaaaactcagtggaattttaccctgtgtattagttagtaaaggtgagtctggttcagttggtttgagtcaaaaaatctgttaatatctctgctttagacctgcatcaggctaatacttgaatttagggtctgtccctggtgtcatctgaatttttgtttgctatgtgtgaccaaggagatggtcactcttcaggatgggtgggtggaggggagaaatgctatgatttctgttgggtcatgtgaaatcaatttggaatgtggatggggcccttacactttttcttttgagcttagtgattttctgtgtagggtggagagcgattaggaaggaattcaccacccttaggtcctcaggcatagggtcttctaggggcaggactgatgagtgaacagcagggtggatggagcagaaccgttggaaccttcagggcaggacctgccaccattatttggtcacaggaagtgttcagtggtgaacttgttggaaatgattttgagtaacttccgtctcctaaatcatattaggactctttggtctcctatggttatctgagttgttttccaggaggagctgggaaggtaccaggagaaagatgactgtccctctcatgtttgctgagggtgttcctgtaaggtgagctagtgttccttttagggcccgtggagaccgaccttcacattgaagaagcatatctgtgctccgagatgttttcatggggagaagtgtcaggtgtaattataaaaggagtctttctctttaaatactgtaggcgatttagaaatagtggaggtttaattgaagagcttgtctacgtttttacattttccttaggcacagagaaactagtatctttctctgggttgcctttttttttggagacagaatcttactctgtcatccaggctggagtgcagtggcctgatctcggctcactgcagcctctgccttccgagttccagcaattctcctgcctcagccttccaggtagctgggattacaggcacgtgccaccatgcctggctaatttttatatttttagtagagatggggtttcaccatgttggccaggctggtctggaactcctgattaggtgatccacccgcctctgcctcccaaagtgctaggattacaggcatgagccaccacacctggcctgggttgctttttaaattcatacctactgtcttatttgggtctcaaatgtgatcagtggttatacttttcttgctatgcatttaagttggagcaggctccggggcaccacttccctccctagagttgatgaacccctcatatcagtgacctccccatgtcacagtgtatctcgtgtgcactgctagatattctgatcacacagtgctgagattactggtttctctccctttctctttctgtggttatagggattctttaagggcaggcaacatgttctttgtttccataggatctgacaaagtgcatggcataggtaggtgttcatcaaaaggggtggaatagggttgatctcaagggttttaagagagatctgacgagtttgggtgtgtgacttaaaaagcagatacagcgccttttcacggatacacctccgtgattcctcaagtggtctggctgtgtttattttaggattctaaaagtaaagtgttctgttctgagtctttcacgatctgatgttctccagttctgtgaggtctcctcctttagtcccatcattggggctgtttctgctcggaaggccaggaagttgctggaagtctgctgggctttgcaaagggacttttgcttgtgtgggcattgcccagttgtgttacaacttgtttacagccgttggtttttaagggatgaggtaatcttagctcagcttagtgtaatacacaacagttttgtttattgagaaaatcattgttgaagtttttcagatgttagagatgttatgaattgcaatcaagtcggtatcctcttatataagtgcatctgacaagcccatttcacaactacatctcatcagtcacagttggatggcaaggtttattgtttaaagtttttgttttttcttttttaagttgggaaaggaagacagatggtttcagaagccaagaaagggcacaaaggcgtggatatttggaaatcgggacataattcaccattcttcttaattttttctgatctctaagacactgagacagctgttaattgaattgcttgttcacagtatttgagacgtaatgaaatgtgagtgtcctaatcacctggcgggcgtagatctttgggatcctcctggaggcttagtagggctgccctgagcagtattgtcttctccagctgggcctctgagctgtaccatgtgcccgtgctcagcctcagtccctccctcagccagttgttaaatcactttggacgtgtgacagcctcaacatgtcacagctttaaaagttcagattttaaaaaggtaaggaaatgatctcctagtgagacaacttctgcctaaaaaataaaagcttctaagacataaattctgtgttatgaacaacttgcaattttcatagttttcagttttagctctggcagcctctgatagatcttaaatatgtttatcacagctggaaaaatgttttattgtcatctttgtttatcataatatgccacctactctggttgtgtcttacaactgtagctctgtggggttttttttgtttgttttatgcttgctaatgggggaggtggggggtgggggcggatgaatataaatgatacctagaaattgaaattggaaaaaaaaatgtattcagccagtactctttccaggttatagctaaacgtcagttggcaacctctatgctgtggtttattgagtaacacttaatacttagcacagccctcagtgaagatcttttatggccttttctgaatgttatacaaacataactaaagcttatccagatgaggacagggacctttctttccttcctttttaaatggagcaaaatttggccactgggttgctgtggatgagagagtagaaggagaaaggcagtcatcgggagactgtgtgctgagagagcgcatgtgggatttggcttcaggaagtctgggcttgcattctatccagcgctaatatttagtgagtgtgatttggggcaaattatttcgtctccctgagcttcagaatgtttgaaactttgtgaggagtctgaccccacactgtaggctccctccatgtatatatttcttcttccttttcctttttttttttttttttttttaaatttttgagatagtgtctcgctctgtaaccccagttggaatgcagtggcatggtcatggcttactgcagcctcaacgtcccaggctcaagggatcctcctgcctcagcctcctgagtagctggggtcacagatgtgtgccatcacgcctggctaatttttaacattttttgtagagatgggagtctcactatgttgcccaggctgcactcaaactcctggactcaagcagtcctctccctccagcctcccaaagttctgggattacaggcatgagccaccatgcccggctggaactgttggctttgaagaagaatgatgctgtgcttgcctttgcagtcctgtcaccatacttcctggaaagtgggtggacacgctggatggtagatgttgagttctttagatgcctggatgcttacatgctttgtgtgggttcttactggggctgtaacttactagaggacagactccaacttctgcttacttagtctggggaggttaataataatctagggcacccgcttcccagtgggtttccatcagtctcctccagcccactctactctctgttagccagctgggcacctcttcctctgtgtcccttcggtatcttcccagtggctctttccacgactggctcagaccatgtgtatatctgctcattgtctgtccagggtccctccaaagatgcctctgtgggctgggcccctggtggtgcttcctccagataattgttgaagatggaacaggagtgtgcaagaacaccagcgtgcttccagtattcaggtctagcggcaggtcccaggcatcagcggctcaccactccaccgcaggtagcctgattgcccagccttggagccgcagcctccttgggtggtgtggcagctgtcagtgtctgaaaccattttgaactttaaagggtggtgtcagacagcagctattgaggctacttaaaagaatttttttaaatgtacgagttcagtggcattaagtacattcatattgttgtgcaaccatcaccactgtccatctccagaacttgttcatcttcccaaactgaaactccatgtccatcaaacaactccccattgcctttttccccaagtctttggcaaccgccattccactttctgtctgtaaatttgactgtctggatacctcatgtaagtggactcgtacactatttgtccttttgtgactggcccattttatgagcataatgtcctcaaggttcattcaggctgtagcatgtgtccagaatctccttcctttttaaggcccaataatatttaataatatatgtatgtgtgataacacatttatataatgtccattaccatgtggtatatatgcttatccatttgtctgtcgatggacacttgagttgctcccccgctttggctactgtgaataatatgactgtgatcatggatatgcaaatatttccttaagtctttcagttcttttgggtatatacccagaagtggaattgctggatcatatggcagttctatttttaattttttgaggaaccactgtactgttttccatgtagactgcataagaattccaatttttccacatcttgccaacgtttatttttatttatttctttaaattttttatagtagctatccattctaatggatgtgaggtggtatctcattatggttttgatgggacttttgagttttagcaaatatcaatgaagtatttaattttttttttttttcttagagacaggatctcacattgttgtccaggctagagtgcagtgatgtgagcatagttcactgcagcctcaacctcctaggctcatgtgatgctcccacctacgcttcctcaatagatgggactatgttcctgcgccatcactcctggtgaatttttaaatttttgtagagatgcggtcttggtacattttctaggctggtctggaagtcctggcctcaagcagttcttccacctgaacctcccaaagtgctgggattataggcgtgagccactgcacctggcttatttaaatttttatgggtatgaattcacttaaaagctgaaggttttgagaggagagggagcatatgaaaaaacctaaaggttttgggaggaggaggagaaggaagagagggagcatgtgaacaagagcaactgattacttccttgtcattcatttgcccagtgtttactaagcacctgctgtgtctcagacctgtgctggtttggcccttgtgaaggacagtaaatacagtgcagttccagctgcgcatgggatcacagtccagtaggtaaacgagtgcctaaacttaagagaaatgagtgcagttggggtcctgtggcggtgaaggggcgagtctgcacccaggcgagtgttaaaggcctggcctagagaagatgggtgttttgatggaaggagctgctgggaagcatgtgtactcggtgtcttggagtttagaaacctcagttggctccatgtctcgtccttagtaaaggaatatcgggagctgagactggatgtattgacacaggtcaaatcacagagtcttaggccatttcaaggaggttggatttttctctggaaggcacagggaggttttgaaggacttaatgcagaagaatgggcactgtcaggtttgtggtttggaaagtccgccttggtagtagggtggagggtgcattatggagggctagaccagggtccagcccccagcgagatgctgtgtggtaaccaggggagagagaggtggtggtgttagaagccacgacttggcatagaagccaaagcatccccaggttgtcattgtgtaattaatggttaagttggggcaagaaataaagctcttaaaagtgtccagctgtagagctctctgcctgtttttatcttcagatttttgtctttgccatctctggcctccagtggaaggccgaagttacttaacttccttgctggaagcagggctcctcatgattgccagcccctgtttggtagtggtcctggagtgctgtggaaatgggatacttggtgccacttaccttggggctttgctcctgaactgcagcggtgtcttgtgctctgtggtttgtagcatggaacagaggctgatgggcggggagtttgagtcccagtgattgaggccccctgcctgcctgcaccttactgaaggaaggacatggtggcttctcagtgtgctctctggtgatctgaacctagattcttgtttcacgggtagggggcagggttttggattcagccctggccagccctggcccaagttcatagtgtcagtagtatagttctcccaccacccccttctctcctgctcctgttttctcccccgccccttctctcctactctccttcctctcccactctccctcctctctctgcctttcacttccccccacactctctctcccccgctcccaactttctttctctcttcgactcaccacacaacacacacctgtgtgtgtgtgtgtgtgtgtgtgtgtgtgtgtgtgtgatggcactgttatttcatgtgtatacctttgcgtagcgttggcacatgtgggaatgctattataatgctttcgttgggggtctgtgctaaccactgctgagtgtgcttcatgttttctagacagcatgagaccagagctctccaccttgccattagctggtgggagaattttgagaaagtcacccaattgctcttaagtcctcatttttttttttaaatctgtaaaatggtatcacagatgcttatagctcaagactagttgatgagggtctgtgactcaaaaggccccatagatggggttcagagggcctttggaaatggcgtgcaagctctttgtaagtgtattttttttggagaaagggcccagctttttatcagacatcctgagagattcaggacctaaaaaataaaccttgattaatcttggaagcctctttttacgcagtacgctttgattcatcagtatatgcatgtggatgggttctcagatggcctgatgtttctcctccttcctctgtgtggtgggcgacgactttggctgcccagatgttaacatcagtaagcagaagctcagtcagtgttagcaaaattaaatcactctgcaaaaatcaatgttagtgaaattaaatcacttgatcttaaaagcagcatgaaatagcagtttttcatcttcattgtgctgttttcccactctagatatcttgcagattttttttggttgcttggttggttggtttttggcgtccttttcaaggacaagcagctttggacagttgcactacttttttttttttttttttttttttgacagagtcttgctctgtcacccaggctggggtgcagtggcgtgatctcagctcactgcaacctctgcctcccaggttcaagcagttctcctgcctcagcctcccaagtagctgggattacaggtgtctgccaccacactcggctaatttttatatttttagtagggacaaagtttcatcatgttattcaaattcctgacctcaagccatctgcctgccttggcctcccaaagtgctgggattacaggcgtgagtcactgtgctcagccagttgcactacattttttttttagatgccattgttgaggatccaggggtttgtcatagattgattaatcagaaagtattaatctaaagtattagaatatattgattgcaggcagggaccttgcatagtttaaagatgactcagaaggcacattaggttcttgccacactttgctgccatcacagatggatgtgagttgcccccttatataggtctctcgggatgccccagtggagaacagcattgatgttgaacagatcctgtccgatggagagataccagcgtttcagccagcggtgtgagtgagggcaggggccacctctgagggtgcttgctccctcacactgtcctcacgctgccctcaagctgtgggcaaaggagagggatcctgtgccatcacagccctagaagcagaattccaaaatgtgggctcctttgggtgtggtttgggggtcaaggagatagagcaagtaaggaatgaactttgagggtttatgatcattttcatgatgataatgacctaaaaacatgcttggctgggcatggtggctcatgcctataattccagcactttgggagactaagacaggaggatttcttgagtccaggagttcaagaccagcctggacaacatagggacaccccatctctacaaaaaaattaaaaaattagccaagcatggtggtgtgcacctgtagtcccagctactcaggaggctgaggcaggaggatcccttgagcctaagaggtcaaggctgcagtgagccatgtctgtgccactgtactccaacttgggtgacagagcaagactatcccaaaacaaaaacaaaaacacatgcttatggtaggcaattaaaacaggaggtaaggagtaaacatgccaggcccctcctcctctcctctgactcttccttcttcccccctgcttcccaagggtaagctttgcagatacttgctatgcaagcaaaaatgctattcttagccatcgtttaaacacagatttgcaatttgtggtttttcatttatataaattttggctctcttcctatagcagaatgatctttgtttttaaaatgattttaagtatacaattaatatgtgaatgtatgtttcttatggaaattagaacaatacacagttacagagtagaaggtgataggtgatatagctcaccctctcctcttcctgctactctccccagtctgcttcactccccggaaggaactactggcccatcagcatgtctccttccaggcattttttccatgtggttatgtccacctgcataagaaactgggggcggcagggtggggcggtgttggcgggtcaggcagaagcaagccacagagcagtaagggtactttttaaaaaaacatttaaatagatccctgttgtcctgcggcttacatgctcatgcatactcactgtttctttaaataaactttttcttttagaatagttttagatttacagaaaagttgccgcgatagtctagagagatcccatgtacctcttaacagcttcgcctctgttaacattctgtgtcaccatggtaatttgccacagctaaggaaccagcattagtccatgactgtcagtgaactaaactcaagactttttttggattttaccagttttgcccaatgttcctttcctggtctaggatcctgtgcagaatagcgcatcacagcacattacatttagctgtctccttcacctcttctggtctgtgacagggtctcagactttccttgtccttggtgactttgacagtttcgagggacactggccaggttttgtgcacactgccccttaatttggagttgtctcatggttttttttgtttttttttttttttgagacagagtctcactcgtctcccaagctggagtgcaatggtgcaacctcgactcactgcaacttctgcctcccaggttcaagcaattctcctgcttcagcctcccgagtagctgggattacaggtgcctgccaccacacccaactaatttttgtatttttagtaaagatggggtttcaccaggttgggcaggctggtctcgaactcctgacctcgggtgattgcccacctcggcctcccaaagtgctaagattacaggtgtgagccaccctgcccggcccatggttttcttatggttagtctgggaccatgggtttttgggagcaagaccacagagctgaaatgccctcccttcagtgatttgtcagcatgacctatcaccattgttgttaaccttcaccacctggatgaggcagtgtatgcgtggggacatacatctatttgccccactgacatgagggttggatctctagaagaggagtcactgttcagaggttataggcatttgtattttttggcagatgttgtccttcaaaatggctgtacacatatgctcctcccaaaagtaggagagtgcctgttgccccatgtcctcactcaagcttggtgttattagattggtaatttttttgtgtgtgaatctgttaagttaaaaatatttctttctttggccgggcacagagtggctcatgcctgtaatcccagcactttgggagtccgaggcgggcagatcacttgagctcaggagttcaagatcagcctgggcaacatggtgaaaccccatctctaccaaaaatacaaaaaaattagctgggcatggtggtgcttgcttttggtcccagctacttgggaggctgatgtgggagtatcacttgagcccaggaagttgaggctacagtgagccgagatcgtgccactgccctctagcctgggtgacagtgtgagaccctggctccaaagaaaaaaagaagattgattgagatagggtcttgctctgttcaggctggaatgcagtggtgtcatcatcatagtttactgtagccttgaactcttgggctcaagcagtcctgctcctttggcctcccaaagtgctggggttacaggcatgagccactatgctcagccaagctaaaaatatcttagtgtgcatttctctaattgtcagaagtgtatttatttaccataccctggaaaccttatgtaagatgatggtgagtttggactttccagtaacatttggaaactgtttagtaccaagctctcattaacaatataaacaaaataggggtctacccttaaggaatcaaagccattatctaaaagctctttcccgcaacaactacctgagataatgtccttggtcatatgccccagcatttaaaaatggagttagtgagagtctgttgtttaccacctgatacattggtaagagctgcttgatggtatggggacatcagtagggaggatatagacgtagccacccccgccctagatagtaggggcctcagggtggggtaagcctgggtgggggaggtatgagtggtggaacagtgggagaccctggatccttagtctccagcgtgattgcattttgccaaggctttgtcccatgtccctttgtcccgtgttccatttgcccgtggtgttgcctagagagcatggaggggctggtggagcatgctctgtggttccctaacccagggctgtgtggggagagcttgcagcacccccctgaccccatatgaacgtccttgctatttcctgctgtgccatccagcaactataggatgctgtgctgtggctgggagacctgtttggtcttggaagctgggtcctggatgagcagaatgaggcaggcatagaggtgatgttggctacgggcaggggagcatttgctttgccttggagtagtgccatttccatgtagaggggcaagatttaccaccctgttgtggggatttgagactttgggttttgttttcctttacaccttgagctttgttctacagcaggtccctgggaagactggtccacaaagctgctgaatggggctgctgtccttcagccctgcctcctgctgcagaatgcagaggacgctgtagacttgcttggtgggtgcctggggttttctgcctccctggtgcactgggcacagcggcttgcctgccttttgggtcgtctccacctcccagggatgtttttgttccctgatcgaatgacctcctgttttgtttgttttttgagacggagttttgctttgtcacccaggctggagtgcaatggcatgatctcggctaactgcaacctctgcctcccgggttcaagtgattcttgtgcttcagccttctgagtagctgggacttcaggtgtatgccaccatgccacgctcatttttgtatttttagtagagatggggttttaccatgttggtcaggctggtctcgaactcctggcctcaagcagtgcgcctgcctcagcctcccaaagtgctgggattacaggcgtgagccaccgtgcctggcctgacctcctgtcttctgtttttgcccactgtcaagggtagacttcttcaaggctgtacttgtgctatcctaaagaggagtaatgggagacatttctgactttgtcagcatgctgcttggcagcacctgcctcgtttctggtgaccatttggaaatgtgtcctttatctggtagcaaggagcatttacattgatccctatgcacttaattggcatacttttattcctctggattttttttttaaagcataattgttcgtgtctacatgatgtaacatgctgctgacttttaagcaaattaacagagttcgtgctgaagcgcaagggtgcagggaaacaaaatgggagggttattaaaggggtgaggcggctcctcaaagatgtcactgcaccattcattcttgtgttcctggcccatggcaggctcattaatcctccacgacaatccattagcatgcctgtcaacccttcagagaagatgagccataggaaggcttagggatccccacttgaactgctgtgtggctctatgaacatccccaccttcctggagtgaggtggttgtggccacctgactttccccattttttttttttggacctcagcctccagcgctcctgggccagactcagggtgggggggatgcaggtgccagtgactgacacttggcccctcacacttcactgcctgatttgctttaaaggcaagggttgctcatgcttgtctgagctctccatctgtttgagaattatattgttctcaactggaacttgtaaaagagaaaaaaatgtacttctcaatttccatggaagaatatagattttctggtggggtggaaactttcttagcatgaagggatctttgtgtgatctgcgcatcagcactgaataaagaatgggtgcgccgaagtcggggaggccgactttcctgtggcttgctggggaaagtttgaactgtgtgtaagcagtgcgtggaaggaaagctaagtgtggagataacgaagggaatgggatttaatagaaacagggtgtgatgagtggcagttgcctgatgaagtggaaatcttgtgttccaaatttgtgagatccatttctgtcctctaaggaaaatgttgtatgtgcaggaggagttcatgtagttgggttagattgtgttttctgtctttattttttttcctgcctctatgggttgtgaacaaaaacaagaatttgatattctgcagtatagttaactcgtgcaaacagtgtatgcttttcagtgggatataaggtctgaaataataggattttccctagtaagtcagtttcattcctttacatgtgggttatgagatacaaagtgaagctctgtaaagctttttacgagctccctgtgttgccctcctttgacgggtcaaggcattggggttgacagaggtttctactctcagaggctttaaagaggtgcccactctggtgagatggctgtcagcatgcacgatgtgtgtgagagagcacctcttcaatcatatgcacctggctgtagcatccttgtcagccttaagagatacctccaaagcggaattttctacccctagaatcatgtgaggtcatctcaatttaagccccagctctgctccctaaattacctgagtgatcccaggtaggtcatttgctcattgttaaccatcagtttccttagctgcaaaacagagcagataacaccccaaaagagttctcatagtaaatcacatcaggcttacacaatctcagaaatgtgcagctccacaggaatcttcattacctctttaggcagtccagtcgggtttcaaatgaatcctactgtctgttcttatatggaaccacagtccctcaccctgtgttgatctaagttctctgtttctctcctccagcagggtcataaagagcctgaccagtccccctccctggagacctttgtgtgctgggtttctgcagccgttctccatgagaagggacttctggtccctgctctcacttggatgttcttccactgacttatctctcttaatgtgtggaggcagaaacccagttttcagggtctctcccctggccccttactaagtctcccttaggtacagtctaagactgcctgactttttcttctttttttttttttttttggcagccacaacatcacatcgtcacatacagaaattatatccaattaaatctcctaagtctttttcacacctcctacatttgtgcatttctttttttgcacccaagtgtccaaatagcatttatttcctctctattgcaattccaatctgttgatctttttagctcttgactctgtcatccagtgtatttgccattgctcctggaaacttgtcatctttgaattagataaacattttatctgtgccatcgttcaagtaattgataaaaatgttgaaatctacagtactcagaaagagacctgtggcctcccactagagaccttccttggtctgttcattaatcagcactttgtagggtaaattgaacatttactaagctattcagatgtagttcatatttcttcaccttgtcaacaaagagatcttagcaaggcattgtagaccaagtatgtgttcctggaatatacatattaagaaaaaatccttatgccaagaaaatgggcacatccccaaaacccaggttattgtagtttacggcttctgacccagggcttcactttgtagcagtgtttttcttctgtttttgcctttggctgataccactgctagagtgcagataagagaatgttactaccagggggcttgagtgtcgggctatgattggctgtcatctggagcagagtgggactgagctgctcaggagaaaggtcttcaggtgattttttttgggaagctaagagcactggttttagacatcctctcctggctgatgatgggattggccttcatggggctgctgtctggctgggctggtgggcagaggttcctgtgggtgtggatggagaaatcctaaatgccgagggtacctggtcttagtagaaatcgtaggatgcctcagtgaagaagtcagggatgcggattgtcctccggatgcttggatgagcgtgcagtggaaaaagtactcctttgggggaagaggtgaatctggaggtgttagagcagaagagtaaatgcagaagttgtagcagatacaaaggctttggcaagagtgggagtgatcattgaagggaaggcaggggcttgctgggacaggctggagccgtgatggaccctcatagtaaccctgctgcattttacaaaggaagaactgtgttggggtacagatgtgccaaacactcaaagttagaaaatcaacgcagtcggttgtggcttctgcccttgaaacatcagatagtgagaacctgccactgttcagtttgcagagtggttggttgcatacagtgttttagctcttgcccactcaatacagaggttgcatgcgggcgtccacctgctccgccacctctgcctgcttgtggctgtgtgcccagagcccatttccctggggagtcagtgcagcactcctgggggacccttctgtttgtgtcctgacgaatctgactgtgctggatgcagtcccacagccacacctggtatgggtggcatctttaaaggcctggcctgtgtgtgctgtatctgcagcagagctgtggccaaacctgctttccttccatctgggttccccttggttctcggtggtggacgggctgtgtggtctcccctcagctgtccacttgcacttgtgttaaaatgcggcagaactttccctctatacttaaattgtggtgaaatacgtatgacataaaacttaccatcttaacttttttttattgagacaggatctcattctgtcacccaggctggagtgcggtggcgcgatctctgctcactgcaacctctgcctcctgggttcaggcgattctcatgcctcagccacccgagtagctggaattacacgcgcccgccaccatgcctggctaacttttgtattgttagagatggggtttcgccatgttggccaggccggtcttgaattcctggcctcaagtgatccccctgcttcggcctcccgaagtgctgagattacaggcgtgagccgccgcgcctggccttccttttttttttttttttaagagatggagtcttgctctgtcgcccaggctggagtgccgtggtgcgatcttggctcactgcaacctctgcctcccaggttgaagtgattcttctgcctcagcctcccgagtacctgggattacaggcgccaggcaccatgcctggctaatttttgtatttttagtggagatggggtttcaccatgttggccaggctggtcttgaactcctgacctcgtgatccgcctgcctcggcctcccaaagtgctgggatcacaggtgtgagccaccacgcccaccggcctcccatcttaacattttaaagtgttcagtttaagtacctttacactgctgtccaatcaatctctagaacacttttcatcttgaaaaacggaaactctgtacccattaataactcccattctctcctaccacagccacgggcagccactttctgctgtctccgtgagtctgactactttgagtacctatgagcagaatccgcaggatttctccttttgtgactgccttatttcacttagcataatgtcctcaagctccatccaggttgttgcatgtgagaggatttccttcctgtgcatgaactagagtgatgcagggactgacctctggccatgtgatgggtggttggtgatggatccaagaggtagctggtctctgaatactagcccagtccttttccttgctaggaaagtccccagatcagatagaaagcctcagtatttcaagaagcttctgttttgacaccacatccatgaagaatcacactgcagggtaggggaacagatgagtgggatttctacactgttatcagctagacttagataactggctaattgaaaagagtacaggtcacttaaggaaactggagcattgtagggcaaggtaaagtgcttttgaaatgaggatgtgaactgtaactggaatgatgtaatgtgttctacaaaatgaagccagtgagaggacaggggacacagggccgacttttatttaggacatttgcctggttctgagaagaaagttgaaagtcacgagagagagggaaaggaaggcagaaggaacttggtttttgcaggtgcctgctcagcatgggccttgccccagcttggctgtacctcacagcaccatccactggctctacagtctgtccttcggaggtttagggtgctgtctcatgcacagtgggtgctaggtggtagtgaggacagggtgtgggactaggcaggtgctgcccctcggaaggcctcatggtgaggcaaagatctctggctccgagggactctatctcctggtgtcctgcttcatcgagaagccagccacccatgggaactgtggataattagaaaggcttagaggctcttctaagggtgttttttgaaatatggagacctagaatattgggctttgggatattttaagatgagaaaggcatttggagtaactgtcagagcagataaagttgtttttatgaagatccgggaaaacggttgttacaaatacagctctgcaccaattctgcgccagtctgtttggctacagatgctttcagtggaggggacactggggcttgtgttccctttagtctttgaattcccgttaaagtttccatgtcttaagtggcgtggcaggatagaaacatctcacccatcttagtaagttctttgctgtatgtagcactctggttttaacgttctgagccttcaggactgcccttgatgtgtgcatttattttgttgatatgcatgatgtgtgggtggctctgcggcagtaaaacagttcacattcaaattacactcggtttctaatttctgttctcagagtttcctctgtaatggaaatctcttacattcttatcattgccttcagttattgaatgtgttaggtggccaggattgctgtctgtgtgaaatgggaatgtatatatacaacgtaaacatgttctgattgacacgtgaagataaagggcttaacatgaattgtgtcggtttacacttacacagaaaattctactgtaataaactgaagtgtcagtagtgtttgttatcataacattgtctttttccctcttttctgatctctgatttttcaattaggaatgaggcctaaagaaacccatgctctctcttctctgagcgcaaggagggtgtgctgagaccttgaagggcacagcatgggaggatcatatactagggagagtctgtctccaccccatttttcttctgctttgctttgtttcgtagtttcttcgggcttcttgggggttttctgagagagagaatgtcaatttgagaagtaacaggtgcacaggctttacctgcaccacactgcagataaggtgggtagggagggtagtgacaggtggtgtggtgggttattcagttctttcctagggcagtgggtctcacagggtggtgcttaggccagcagcatcagcatcacctgggtgcatattagaaacaaattttggggcctcacctcttgcgttttaacagttccttcaagtggtcctgatgcatgttgaggactttgaacactcctcctacaagcaaagtgaagttgacctcccacacacttgtctcagtctgctttctagcatctgtcccattgcctttgttgttctccccgccacacgggctgcacccctgggattcccccagctgccaccaggcatcagctccagctgcctcccagggtgtgctcctgcctctgcttggagtaccctgcctcccactcttcctggcaagaccctgctcatctttcagggtcgtctctgctgagaagtcttcctgacctcctcggagatagggagttgtggggccttgtctttatgttcccagggttctgtctattgcgctattaaaactttttttttcatttaatttgccacttgctagagagatggttgttctgccttcgttgtgcaaaattcagtgatacactaatcctctcctaacctcttaaatcattttgactttcacagagtgatagtgtctagagagggtttttgttgtactaagttattggttccaaagaattcattttaagaggagtaaagaactattatagtatgccgcttactgagacaaaaccgacttctcacataagcccaaaggttttgttatgttggattttaccattagagttaaagatgatgattggttcactaatgtgctttaccttcacagtgtgcctgtagacctgtagtaaaagaaggctaattatgtttcctgatgtcttttatttccaactataagctaagcctatctcattttttttttttttttttttttttttttgagatggagtctcgttctgtcacccaggctggagtgcagtggcgtgatctcagctcactgcaagctccgcctcccgggttcatgccattctcctgcctcagcctcccaagtagctgggactacaggtgcccgccaccacacccggctaattttgtttttgtatttttagtagagatggggtttcaccgtgttagccaggatggtcttgatcttctgacccgtgatcctaccgcctcggcctcccacagtgctggtattacaggcatgagccgccgcacccggccaacctatcccatatttttaaagaagagttgatcaagtagttacccattttaactaaatggataactataacattctttaatggaattgttgacagagggataatcagtgtttttgctaattcatgccaccctcctttgttgtatgttagtaatatttacattggggcaacaaaatagatcagtatttccattaatgtttacttaataacagctgctaaaaggtattactgtttgcagtaacacaaaagcacttacctgattcttatgccagcttctatagggtaggtagtgacagcccattttgcaggtgaggaagatggggtttagaggtgaggtgtgtctgcctgagagcaggagctggtaaatggcactctgggctcatgggagtcacgctgtttttttttttttttttttttcctaggacctcaaggttgtgtctaagacataatttacagttctcgtgtaggtcttccaaatacttagctacacagctttggggcgttttctcagccaaatacttttctttagcccttctcatattaacatttagttcttagggatttattttcaaaatatatatagcttgtatatgccattcacctaagttgttagagcagacattctgcctcttgatctttagaaaatacctaagagtattttgttaacagtactcatttcagctgaaagactttattttaaaatttaatttaattttattattgttttttgagacagaatcttgctctgtgtctcccaggctggagtgcagtggtgtgatcttgacttgttgcaacgtctgccttgtgggttcaagtgattcttgggcctcagccacccaagtagctgggattacaggcgtgcaccaccacgcctggctaatttttgtatttttagtagagatggggtttcaaactcttggcctcaagcgatctacctgccttgggctaccagagtgctgggactgcaggcatgaaccactgtgcctgacttttaaggctttctttaaaatggcatcttttggccaggtgtggtggtaatcccagcacttctggaggctgaggctggaggattgcttgagcccaggaattggagaccaacctgggcaacatagggaaaccctctctctgccaaaaaattaaaaaacaaaacaaaacctaggtgttatggtgtacccctgtggtcccagctgcttgggagctgaggtggaaggattgcttgagcccaggaggtcgaggctgcattgagccacgattgtgctgcagcactctagcctgggtgacagagtgagaccacgtctcaaaaaacaataaaaaataaataaaatgacatctttggagaagtgaattctacccaggtaccaagcccctgcctgcccctcccaactcccttccctgactcccagcacccccatctgttttggttctgctgttgccattctctggctttggggactttgctgaggccccactgtccccatcttccagctgtaccctttctctctgcttccctgcttgtcttattctttacagggctgcctgggatctcacattccaaaagtttttgggtttgtttttggatcatgccaatatcggttgctttgagaagggagaaagggtattttgcattttccttttaatcatcggtgagtagccacaaagggtgtgtctctccctcttgtgctgtgtttactgtttactccctcggtgcatgaattatttcatggcaccagtggagcatattttcttctctttcctgtttgtggcttgcgcctcctgaacgctgctatcattcatggtccagcttggttttctttttcactgtttctatcacaaaacctcctgaagaccagtggtgtcagtcataggctccaaaacagctggttcctaggccctgcctcgtgctctgtggtttgggcttgtcttttcttccagagtaagtgggtagcttcttcctactttttttctcttttcttctataaatgggaggaaaagtgtgaagtatggagactgctctttcatttgaaggaaattcacagttccagctctgtagtgtggcctctgttaactagtggtcaacactgactgtggaaggggggccagatggcaaagtgaagcagattctttcctcctgtctgcattttgattgcagtatgaagttcaacttgcttcagtctttgtcttcatgttgtttcactaggtactgaattttgtgatctgttggaaataacaagtaaatagatgcctaacgctttatacaggttgagcctgtctaatccaaaaatccaaaatccagaatgcttcaaaagtttcagcttttggagcactgacatgacaccacaagtggaaaattccacacctgacctcatgtgacgggtcacttttcgaaactcaggcacacgacacacagttaatttagtgtccccaagggaaaaaaagaccctcccggcccccttcagctgtgatgtgtcttttccacacatgcccagattccctcagacacctccacaaagggtaataaaatggttcgttgtatacaaactttgtttcatgcacaagattattaaaaatatataaaatgactttttagagaagcgagaagagaaatgagaggtaggggagggagggaggagttgggggacagttgggggaatagttgaagctaaggtgtttaggcagagctctgaggaggtgacgtttgagtggagacccagatggctagagaatggggcagcctcctgaaggagcagaagcactgtgggcggcagggtatcacagaggaggagctcggtgtgttggaggttggtgagtcccgtggagtcttgtcagatggtgttgggacagggacggaccgtgaggaggctggatcatggggaatgtgttgctttaggccaagctggagttgatagtggctcagatcagagctaaagtagtggagacacacagacattgaaagaatgatgaaattcactcattctgcgtgtgtcccatgtcatgtgtccgctgcacaccaagtactgttttaggcactggtgatataattgtgaaccaactggagctgcggtgagagagaccatgaaaagaagggccagagcggtgtcctgcagagggtggtgtaccttgggagggaagtgtgtagggttgttgaggaacagtgtgctgcacagggaggaaagacgtggggcagcattgtgggaagagcaaccaagattctcataggcttgggagcggaagccctgaggtctgttgctggactagatatgtgaggtgtgagaggagagaagaatcaggaatgactctttgattcttaacgtgagcaactcagagaatgagagtgctgcagtttacaagcttggaaggtggattatgtggggggatgagtgagttgtttgacacctcaatggatatactcagatggatgtatacgttagagctcaaaagagtctgggccagtgacatgaatttgatcatatctagagtatgagtggcacaggaagccacttgtctggatgaggtgacagaggaaaaggttgaggatagcaaccaacatttagaggtaaggtagaaggcagagcagtgtggaatcagggaagccgagaggaggaggcaatgccaggtgactggaaggtcaagtgacacttcgacagtgtcactgagggctctgctaggagctattcggtgtcataatggggacagaagctcagtcggagtgggttaaaggtaaccaggaggtgagggtgctgagaggtgggactattgacaagccttgtgtcaagttttgctatgtaggggctgaaatctaatgtatgtgactgtgtataagtgacttgacttccccaaatctgtttcctcacctttaaaatgggtgtttgccaagtgctggtttctgctattcttttctctgtcttaggggtgtcattttctctttggtaaaacagaagaattagatgatatgaagtttcacattctaagttctcaagctttgcccactcctcagcccttgggtccctccacttcctcttctcttcgctatctctgctcagtttctgtctttgattgtaatgtaatgcccagtgggacttttcttctctccctcgtctgttcacttattccgtcctgcactgggccaccagattaatcctgcaaaaggcctcacatgggcttctctcctgctcaggagccttgtgggggctttattcctctgagatgaaagttcttatccccacatgtgatcctttatgacttgggtgctatcaaattcatttcctcaactgctcccctcttcaccctgaccatcagatctgctggcacatgggcataccttgttctgcattgtctctggcctgtgggatatttaccgagctttaaatcctaggcaccctttgggagccggcctgtgtgcagagctccccttagcacggtggcacaaagcttggacaccacctcttgtctgtcctgcttaattccattcacatctagagtggactcgctgtgtgcacaccactgaccacctgcctcatgtgacagttgttcctcatgggtcttagctctttgccttcaccatgagcctcctcagagggcagggcactgcctgttggcatttctcgtggtatcatacatgttgggtgcttcccaaattaattacatcagtcagaaaacttcactctatctgagaagctttaatagtgtacttgggattattaaatcctaaaaaaggttatcacaaagagttttcttggtgtgtgtctgtgcttagaatttagaaaataagtcatccagtattgaggccattttatgaaaagcctttaaaatctgcaaatgcgttggcccagcacttccacttctagggatttatcctaagaaaatagtcttgggtatctgccaataatgttcactggagtgttgtttataatgtgcaaaacaggagctaacctaaatgtccaacaataagggattggttaaaaaaaaaaaacaaccctcatggtgtgtattaatactctggaactactgtccccttaaaatggtgatgtagaaggacatgtattgacctagtaaaatattaagtgaaggaagtgtgtttacaaatgtcatttttgtctgatttcacttaccttcatttatagagagtggataattggcatagatagtgttaacattgtttatcgtggaatgttgagatcgttgatgatttttactggtttttttttttttggttattacctctaaactctgtaggaagcatgctttcttgatcaataaaacttaaagttggagtttatgctgcttttattcataaaaaaatcacgtttttaatcttctgttaggttatcctttatgtctacattaatgcacgtgtggagagaacacagtctactcggcttatgtcaaatggtagtgggaagcatggaagcatgcgttttttagtccccactttacaagtcacagtgacggttctccagtgtagagtagattgattgccctgtgtccttcaggcagggtgcagtagtaagttattgatacttggctgctgagctgtcgttcaggccttggcaactgacgctctgcagaacggaccaggagtgtgcggtggtggagtccggctggcctgggttgcagatttaactttcgcctctgcctctgtgtgcctctgggctgtaagctttagtttgcacggttaacggggatggcctctcccatggtcggttggagtgtgttgcacagcgtctggtccagtgttggcactgtataaatgccagctaactggttagccacctaaactgtcagtctgcaacccacagctctgcagtgaacaattgaacctcatttctttaataataatacaggattcctgaaaaccaactgtattattgtttggaaaatagtttaaaaattatttccttctaactgagacgtttaccctcttgtctcccttcagtctgcgggccaggcatcgacatccgcaacgactatcagcagctgaagcgcctggagaactgcacggtgatcgagggctacctccacatcctgctcatctccaaggccgaggactaccgcagctaccgcttccccaagctcacggtcattaccgagtacttgctgctgttccgagtggctggcctcgagagcctcggagacctcttccccaacctcacggtcatccgcggctggaaactcttctacaactacgccctggtcatcttcgagatgaccaatctcaaggatattgggctttacaacctgaggaacattactcggggggccatcaggattgagaaaaatgctgacctctgttacctctccactgtggactggtccctgatcctggatgcggtgtccaataactacattgtggggaataagcccccaaaggaatgtggggacctgtgtccagggaccatggaggagaagccgatgtgtgagaagaccaccatcaacaatgagtacaactaccgctgctggaccacaaaccgctgccagaaaagtaagaatgatgctgactgctgctttctctctgcctctctctctcctctcctcctccttgacctcccttctcttctgagtgcacgagttccgctgggcagggtgcagtcgtgttgcatttaggacgtggcatgcctgctgtgcggaagtggttcccagtgggggtcttggttggctttcctttgcatctgggactcttggattgcgggactgtggcgtggctggaggccatcatggctgctgtcaagactgttcaaatcacatgttagaaataatccagcacactcctgggctagacacttgctgaccttcagctttgaattcctgatgagaaaggtgacctggtgtgcttggaagtccctgagccttggcagctgggggctgcttatgtgtcagctctttcatcctttgtgcgaagtgatattttttgttctgcaggacttccttagtttgaatggacttggaatatggttaaataaagggaaggtaaagcactaactcatatcctgtgaaagtggtccttaggtcctagtgatgatgttatgatactcaggtgtcctggttatgacagagcacctggcccaggtgggagacctctggacccatttctgcaagtcccaggttcaggctgtacttgcaggtagctgtgtagcagggtgcatttttaaacctctgggattctgttttcgttcttttatacctgtttactgaacagttgtgaaaatcttaagatttcacgagtgaaggaactttggaaagtatttactgttctgggggtcagatggtggtattttgaagcttcttgtatatttatctgcaatatgcttattttcccttgagaataactgagctcttgccttcatgtgatcagttccttaagaaccaggctgtttggtattaaaatgtgactctgagccttcaccttattgcattcagcaatagttatgtatattggctaggaagcttttcctcactggtttgaagtcagtgtgttagctataaatagctattatttaagtgttggcccagttaaagatgtaaggaacccatgttctctagttatgaagaaccaagaaaccccaaattgttagacttgcctaaaataaataaaaggcgagaccccacaggggtgaagtgtgtaaagtaaataaaggacagacctcccaggtagcccttcagttcccgttcaaccagtcctgaggcaggaaaaggatctgtgtaccctgatctgccacgcacttttctattctgcagaattggatcagtgcgtatgtgaacattgattagtgagggcaggggtcccactggctgcagccagtaccttgtagagctctgagaatgcagtcaggccactttaaggttggctggagttggagggagatcttatgctaaagtcacttgtgtggttgattaaaactgccctatcattaagttacccactggtttgagaaaacaacaaaatatattttttaaataaccttgacatttaaaaattttatctgaaaagtaaaaggtgttatcaagggaggcagcatggagtagaaaagagatgttgaatgtggtgatgagggccaggaatgaccttggatgggccagcccttctgggctgtagttgggcttttttaggatatttctagggcagtccagtacatcccttagtggtgatcatatatgggcatgaggatgttttgaaaactcataagctctttagagaagggaggtgccatatgaaacgtcattaagtggagagttgttcacgaactaggtaggtagttactttggtcttgccataggtttttggctgtttctgatgagctactgattgaagacccctggggtaggggtgaggcctgcattctgggtccaagtctaagagtggcgactagaaatgagcaagttatttaaattgcctgggccttggtttcttcatatgtggaatggggtaaagcctgccttcctcatagggctgttggaagatgaaaaggaggaaggaaaagcaccgtgaaaatgttaacgatggttagaaggtgggctctgctggtgacagacagagccttgatatcacctgttggttggtcacctgcttccccaaggccacgccctgcagccttctccttgaccatcccagccctgctgatgttccttgtgatttcacaatggagtacttatataaaattggtaactgctttccgggaaattgacttcccttccccttgtcctgaaaactcaggcatgggcatatttcttggagattttctagttgaatcagaacttcctcttggtttgcgtagattccatttagacctgcattgtccagtgtggtagccgcttattgagtaagccacgtggcttattgagtacttgaactgtggcttgtccgaattgggactgctttaggtgtaaaatatacactagatttccaagacatagtatagcaaaaactctgtacaccatttcattaataattactatgttgataacatgttgaaatataacattttggatatattagattaagtaaaatgtgttcttaaatttcacctgcctgtttcctttttattcttttttttttttttttgaggcggagtttcgctctcatcacccaggctggagtgcagcggcgcgatctcagctcactgcaacctccgtctcctgggttcaagcgattctcttgcctcagcctcccaagtagctggaattacaagcatgtgccaccatgcccgtctaatttttgtattttaactggagacggggtttcaccaccatgttggccaggctggtctcaaactcctgacctcagatgatccgcccgcctcagcctcccaaagtgttaggattacaggtgtgagccaccatgcccgactctttttaattcttaatgtggctacttgaaaatttaaaattacagatgtggcttgcattctgtgttggtaagctgctttagagcatttcttttaacaccaggagttcttcccctcatcatctttttggctgagtcgtcactgcagcgctcatagccccgcatgtacctctccagccagaacccttaggaatcatttggggagctccatgaagggcattgagtccaggcagaatggctaccttgagttcaacataagcattaagatggccattcgaaaacattaagcacagaagaatcccattcaggtaatcttctgttggctggctgtagaactacggagaacatctggagaaacacgtcaagggtgtgtgtgaaatcgttgagcctactcgattttgtcgtgctgttgcgcggttttcacttggcactgtcctttaaactccttctgtgccgtgactctgcagtgtctggcagcgtagtagactctactccctctatggacgtgatccctctgtgggttctctgcacacttctgtatttctcggttctttttggatttaggagtggattttatacatttttgagtcattcctaaagagcgattgacccttaaagaactgtgtacagtggtttcctttcagtaagaacatagttgtgtggcaccccctgacatgtggtgtggttgattcttcttccttgtcttccaacgccaccctcttatgagtctcttcctacccccacaggtgccgcttctctgtctcccttccctcagtctggcttttaacggtggtctcctgacatagtccattcaggctgctgtaacaaaatcccataccctgagtggcttacacacaacagaaatactgctcacagttctggaggctggaagtccaagttcaaggtgcttaccagattaactgtctggggagggcccacactctggttcacagaagcaccttttcactgtcttcacatgttggaaggggcgagggattttttttctggcgtcttttttataagggcactaatcccatttgtgagggctccaccctcatggcctaatcacctcccagagccatcatactggggattaggtttcaacataagaattttgaggggacataaacattcagatcatagcatggctggagttctgtcctgggctctcttttcactttccttgttctcatctcatccactggtaactgcattgcctcctgtctccacctaaacttccaagtatctccagcccagaacccttttgagtccaggacctgtcattcatatccatcccagaacccttttgaacccaggacttgtcattcatatcagaccaccacgagcatttcactacagcctctgatggtcttccctgtttcctcacttttgcctattttttttcttttctattccctcttaagtgggccacacttttgttcccctggttcttatgtcaggaatgtgggtgtcctttggacacttccttctccagttggataccaggccctttccctcccgaatggaatggaaatgctgcttcagctgtgttcctctgctcctcccccttacagcagtgacatagcctctctcctgctattgtgtcctgtggctccaccgagcactggggagcttttcagtatgcacttttttttttttggagaaagagtcttactctgtcacccaggctggagtgcagtggtgcgatcttggctcattgcaacctccgggctcccaggttcaagtgattctactgcctcagccgcctgagtagctgggattacaggcccgcaccaccacacccagctaatttttgtatttttagtagagacggggtttcaccatgttaaccaggctggtctcgaactcccgacctcaggcgatccaccggtcttggcctcccaatgtgctgggattacaggcatgagccactgcgcccggccatctagtgtgcactttggactgatgagctcccctacctgaaatcctgtagcaagtccctataggataggcatgtggtacagtgtgaagctcctgagtggtcaacagctaccccgtgacaacatgccacactccatgtgccactccctcccgcctgcctgctgtgtccttggccccagtggtgctctcccgtgctgaccagccggcacggctcacctggccgaactctagccttgccttttcctctcaaggatgtaaaggctctgcagatttcgggaggcctgtctcccagcacctgatgggacactttttgccccactgtaaattctgggtgtatcctccactgtatgctgtcaccccaagggcaagcactgcatctgcttagtgaaggatttattgttcggaagatacattttccccttgagcagagagtggcgtatcctggcagtcttcggtgagccagttgtaccaggattatgaaatgcagatgtttactgtgtcattgttgctgtcattgctactgaggagtactgaccagaatcatctgcaactcttagttggcagagaggaccactatggcgggtagctcttttctttcctgccattgtggggatgattccaggccaaagatgatggagaagtatggaaatcatctgaaaggttgaagcttggcacgtgaagccattcatgactttgtaaggcagttttgctgaaggccagttctgccctgggagggacggaggtgaatcctcctgagtacctgtggttttcttacttcctgctgaatttacctaagtgcctgttgtttgcttgctgtggaggctttctggtatttcatttcaggtgcagatgccttcactttcccacaaaaaaaaccccaacaaaacctaagaccttactgcaactaagtctccaagtactttttaacccaatgggatgaacagcctgtggtctgctcagatcaccctgagtgcgtgtgagaaggcctgggctttgccaggaaatccaggaaggcagggccgggctgtgttggaagctggcttagctggtggggcagccttatttcaattaaaagggcattgactgggagcagcagtcctggagtttgttgcatttcctattgccctcaaaatgagaaaccaggaaaatagcagattggagccttcgagaaggcagtaaatggctgtttttattgacaaaaggaaaacattttactgccatctcactgatggcatctcactgacttaaaatgaaggcaggttgtagtaaaaaaaaaaaagtctacatttttccaccgccacgttcttatatccttgtttgtcagccactgctcacaagggcagtgttgtcttgcggagtagaggcgctctccttccctcgttttcctctataggttggtgtggctgacctgctagatcaaagtggaggacctgtttaagaatgtgtaaattgaaggctgggcgcagtggctaacacctgtaatcctagcatttggggaggctgaggcaggaggatcgcttgagtccaggagctcaagactggcctgggcaacatggtgagaccttgttcatataaaaaaatttaaataattagctggttgtggaggcacgtgcctatagtcccagcactttgggaggctgagatgggaggatccgcctgagcctggggagatggaggttacagtgagccgtggttgtgccactgcacttcagcctgggcgacataatgaaatcctgtctgagaaaaaaaaaaaaagattttgtaactaagttttatggctagctttgagaaaggaaaataataataaaaaaagaatgtgtaaatcacctgctggatggggggaagaggggcacattgtctttgtagtgagacttcactcatgtgatgtgcagtatttcatcttaacattttttttttaaacttaagctacttgtgaagagctgagatgtttctgttaagcactgtgtggtctgctgctggtcttctgcaggccactgttccccagactgctaagacgatcatgacacaggcttgcattttcaggtggactcttgggaggggcttgtggaccctggaggagaaggcagccaggagaggggcatctggctttgtgttgttggtaggaacttgtctcggttgccctggaaggcctctgctctggtcagctgctcccagtgtgggggtgatctttatttagaagggggtcacatgcccccaggcctcattgctatgccttttatagtcaggcgtggagctcacattctcttctgcctgattgccgacgcttgttgccgagatggtgaagcagtttgtgtgcaggttccctgggacctggcttagcccacctcatttcttggggcgtgtgccttgtgcctcaaagactttgcttttggctaattgtcattagtgatggtgtcaccatcctgggcctccttcagaagtttttaatagggatctcgtctaagagaccaaaaagctttcagaaccactgacttgtggtgatttttgcatgccaagtatttggaaaatatctggagccccttcagctctcaccagttaaacctatttgtacatttgttctggtttcttcctgtgcttgaaaagcctctttctttgttgcgttaatacctctgtcttgctttcctcatgtgtatgccagtgtgacattctcggcagagtggggatgacgtggagcgtgtgggcccgtggttaatcttgtcctgaattgccttgctcaacttgcgtgtatagggtggttcaaaagttaagtttggctggtggtgaagttggaagcatcacttagaaacacgcctcctttgggcatatggtgtgaatcagggactctggctataaaaggtggggtctctgagcaccatcctggttggaatgttcccctgacttggaggtagcgagagacagccaaggtgtttgttccagggaggctggtgggtgggagatgggatttttctgtctgtggcacaggcagtattaagtagagcaggctgtttaaatcacattttaagtaaaaaccaaagtgcacagatgatctgcagaacttctgggggataagaagctgctttcctcgaagaagttcacctccaaaccagcgcccatggctcagcagccagcatggcagccccaggggtacatgggacttgggcatgtgaggctggtgagggacagggacagctgggtccagcagtgcctttcctagggacggttgccacgtcacctgtctgccctgtacttccatttcctttctttgaactcggggggcttgcatcggactacctgtgccgtttcctcaaactctaaaattgagtaagttactgagggtttccgtggtctgctctgagaagatttcttgcttcctgatctgcctgtgtgttcgtgttgcttggtctctctctctgtctctctctctctcctctttgatcctagtacatacaggcaaggtatgcagcatttaaaatgttcataactcatcaaatggcacactgatcatcatgtataatttgggaatcagggtttaagaaatttagagatcatttatatggaagaaggaaccccaagtagaaacccaaaatctagaccattctgggttctaatctgtacctgccactggctaacatatggctttaagctggatgttacaatgagagctggagtttcgtctgattgcacatagccttgcttttctgtctttggaaaagtagctcactgcagagccctggtaaacgtttgaactgcattgcgggagtaggcagaagaacagaacagtccttggagcttggtaggaggtgtgagggcttatgggggacagttgtcttttcaagtcaaggaggaataagggcttctggggccggtggaaagggtgagtcttaggcagggaagggtgaccatccaggttagatcacttcttctgcggggtcagcttggccgctgttaggttttcaggatgtcatggggctggccaggcctcacccctgatatccctgagcatctgttccttacaatattgtggagtccgtgggggcagaagctaccatcctgtgcctgccctcactctcagtgtgactggtcttcaggatgtttaggtggctccacatgcggatgtacagctttcccctgcttgttttccccatggcatattaacagcgagatctgcaagaatacatcattttgtacagaacaggatgtatttcttttaaactacgttcctgtgtggacaagtggtatcatatgcaaaggtttaaggaccgttgatgccttgagatagtgccatctgtttgcctcaggtatgtggtgctaggacaaagctgccagacctcaccttccttcagtgagacaggaataggacagtatttgaaaagcatctaacatgtttccaagcacataggtttttggtaaatggtggcagctgctgctattttttttttaaattaaactatctaagagttgcattctgagaccatctaaaattctgagtcttaagctgtgttgactatatatgttcactaccataactaaatggtccttctgtattgcttttctaaattgtagaatttcaattattgtaaatagcgggccatactgtaggtgtggttcttgctaatttgattcgtactgttcaaattcttgtgtctgtccagataaactgtatctttacagaacattcagcgaggtacatatgtctatatcggggtgccagtggagtcaccctagtcatatgtaaactctatttatttggttccgaaactgaatttattttgtttgcaagtttggtatttgggagcatttaagaaatatccatagattcttgtatgatactgacattaaatcattaaataccatattttttaaatgcctctgtctgtttgcatggataacattaaagtggttagagtgggcacagttattggtaaagattacaaagatgtgcatttttatgacaactttaggtctcacataggtagccaaccatctgctccaggatgaagcatgtgcctgtttatcctcttctttggtaacgctaggtatatgtgtgcacacgtgcacgtgtgcgtgtgtgtttgtgtatgtgcgtaccactttattctcccacccagcctcttctcctgttttgtttagtttcattttcctcctctcacccccattgcaggaaacaaacactggctctctgtcctcccttaggtcttccttccgttcaaggggatcaggtgggtgggaaaatgttgtgcaggaatgccaggcctctgcccgaagccgggcttctgtttcatctcattattgaacagaagtcgctttttgtttctttgccttggtcacaaacaagcgcccagtcctctcttctttcttcctgccatttttcccagaatccatgtgggatgggaacagaggcagcgtatttagggactgtcggttgcttgatacccatggccttgtttagagaagctgcacccactgccccaacgtgtagctgcatctgatttgtttttgcaagtcctaatgaagggacctggatgaagttagtgaggttgccgttcctggggttaatgcagagtggcccatggagcttagccacccttcatgcagaaggtggggctgagggcagccagtgtgactgaggctcgctggcccaccctgagctgcttgtgcccatggggcccctggggaggagggcccagctgcagtgcgcatacatctgcccttggcagcagatctgtgaacccaggctgccattctggatttccggatagatgcaaagtgcttggacgtgttttagcagctgctgagaccaggagttgggcttagtagtaaaaagggggaacaaaataaaagaagatcaggagacaaagagcctacagtacaaaaaaggaaagacgaaggttgatattattagaaatacttcctgggcagccttactgtttgaattaggatcacccccacccccacctcccagaggtattagttgtaatgcagagacaaatggaaactagtcagatccttgggtcctagaaaagaccagctttgttcctggggtggtaacctagtacaacgtttccgttcctatttcttgacctctgaatggccccttctgctttgctaagtagatgatattattaggtgcttagactattcttcagataggatgtaaggatatatttttgttctcttcctcagtgaacttgaaatgattggattattttgtaatacgtcgatactacttttagaagcttttgaataactgtgtcaaagaagctttagaagaggttttaagcaggattgcagagaatgtactgagtgtgtttttccactcacaaggaaagacagcagctgaatgcagaagtgtgtgtctggttctaactctttatcacttcagggactgtccaggcagcaccatccgttgggtctcctgcccttcctcctcccacccctgccttacccctggccattcttttgtgaccagtagtcctttatgaatggaattctgagaatgtataattttctcagaagaatgcttctttagctcaccaaatatttcttgtttgctgaggggggaaaaagatcctccttggaaaagtcactgggtgccaaaggtgggtgatgaggagagatgaacttctgggtgtgcctagcaaagctgtttctgttgataggcgattaacaaaacagccaaacttgacctaacagactgccattttgagaggaatttgttttgcaggattaattggcttcgaggtgtactggtggctgtgcagtgatgacggctgtcgtgcctcctgtgtcttctgctcattgtgatgcagggcaagtgcttaggcctcagacacaggctccctgaacttcgtgttcagtgctttagggtggggggacttgagacccttgacttgactcggtcccactggaaagcttctgttgcttatttgggtaaccccaactctatcttattgggcagtagtgttatcctaattcttggaaatactcagtgtagaataaagagctgatgaaaatgtgtaagaagggagtaagtggtcattagagagaaatggtaattgggatgatgctctgaccccttcagcaaaaaataaaaggtgaatggtttattatgagctagttcagattctgtttttggaaatgagcttggttatacatagtgcatttgaaaagcgtgaagcatggactttcagatgccagctcctcagcctcctgtaactccagtcgcaaaatccctccagtgtatctaaataaatgcaaactcatcagtgccttaccattataaagctgggctggagaggcaggtggcctggagaatcaaatgacaagaagtatagggagcagcccagcttcatgatcgggggaatttgcatgaaaattgtgtacacttaagcaccattgtctattgcagaaagcacgatctggcctcttctactgactttccttccagctctgagattcagttttgaagacaaggttgttggggacctcggatagatctgttggccgtggctttcagtaaacactactagagactgaggacatgttctagacttggaatggtatgaagcagtcgaactttttaggatgggccctacccttagggactgcctacgaaactagatctagaagaggaggctgtggacattaggaggtggctgcaattgggaagttccagagagcttactgagggataacggatgtaggacaggaggctggcaaagcacctcagtgatagggcagaaggaaataaagtggttagggaaggagttgagagcaggaaattcaggtaggattgatgttaagtcttagatctttgaagtgactttctctggtctggcttttgctgttaccaaagtgaattattcataagtgcatatgagaaatgctgatgtaactcgattatgtggaatgaatttaaattcatttaagtcattcttttccactaaagtaagctttccctcatccagaatctgagcagcccgatagccaagcaggagtttccttgtgccatggccagtgattgatgtcttcttctatgatgctgctgaaatgctggggactctgaagcgcagctggagtgatcaaagcaaaattaaaatactttctcagtggtttgggagttgggtgcgttctgctgtattttttggttttcggcatctgggtttggtgtgcatgcatggtgagctctagctggagcagacgttacctactgaggctacgctcttcgtggtttctccttaaccatcacccacttgatcttccatgaagccccccaaatcttccttactgaggactcttgcttccaggttgcttttgtgctcatccattgctgggttatttggtcagtgatgatggtttctctgtactttttatcagtaggttcagaggaccttgtttactcctcattcatctctctccccaaacagttgagaaaccacttgtgggttaggactcatgctttgtttataatgtttgattctccaacctcacagctaatgggaagcccgtggaggagatactctgtaaaaatccatctcccatgtgggcttgaccccacttagtgtctgagtggtttggtcctcatagttctcttgggggaggaggaagggaaggaggaggaggtggcgatggcagtggcagcagtggtggcatcttggaccagagtgagaaatcttggaccagagacaaaagaggtcttctctcagggtagtgcaccatgagagggagcacctgtttacattttgtatcctggacaccaatcttgccttgctctggtgctggccctgagaggtgcaggaattttataaagagatttacaaaacatttttggatgaccaaattggtccctggttctagctggaatgaataaacaaactaaataacagtagagtgtgagagtaagtgtgtgtgctagagaatgtgtgcacatgtatggcctaggtgagttcttcactttgctgacttgtgaattatttggggtcctatggtcctccccatcattcttattcatgtcagtccaccatcattaaggaagtggaagcgaacacattgtgtacatatcactcccatagagagggagactggggaagaggtttgagttataagtcgcacctaggttaggtctggatgtgtctttgcaggtttccttgctagttccttggccagagtttccatcgtgtccctcagctgcacaattaaggtgcccccgttttgtgcaagtctcatgctaggcagtatgagatgacacaaactaggattctgttgtgagataagataaaaacacttgacatttaaaagagagagacaacttatgcggtgtgacgagacactctacgacttttgccagaagagaaatagaggcaacaagtgctaggagctcagaggagggtaagttccacatttggaactttggattaaaagaatatttgggtctggttgaaatcgaggcctttcatgagaaatgtccacacttgctcagtactgtttgccgaacactgtatacaaggccctcgactcgtgaatgagttgtaatgcaaaactttgccaggcatttggaatgtggagtatactattttgtaaagatgaggtctgaatggtggtttaggtcccaggccagtgtccctctgccccccacctccatatgtgccctcaagccggtttggcttagacattatttatctctgactactgtgtacagcttagttccatggggaggaaaaggcttgatgaaccctaccctggaaggctggtggctctgttttctgatggatgaggtaggagtggtggaaagctggtagtttctactttgtgcctgtttaaaaagccccctctgaggccttagcacttaacagatgttcaggattgggggaataaaggagctgcctttgcagaggtctgtgggcatgcagtgggtgagagagcaggcactgagtgccccgagtttcctgcctgtgtgggcaggaggattctcagtggaatcaggagcatctccgcctggtgctggaggaggtgtggagttgaaggtgggattcttcctcttgaaggacttgaatgagtttctgtgtggctgaacagaaactggttcaacacccatgtcatgatttttgtgaagcgaggacttggggtcccaagtctaggttttaggttccctgctgtaacccgtggccaccgagagagagttttatgataaaatgtcagcaaagtacctgacaacgtctcacgctagaatgagtttcgtacatgtttagttccctctctttttattccacgctcccccaccccaactttaaatcagaaacgtgagggtgctgattgaagctttttataacttttcttattgagaattgttctctggagttgtctccaagaacaaaggaattccagacgttctccttctctccttgtctcttctgtcctccagtcaaagaaaaactctgcatatgatctttggcctggagaaatattaaatctatgttaagtatgcagacatgaatgggcaaatgaaggatttgtggcaaagaagatctgccgaaacaaataagtcatgtaaatgggcagagggaaatattaaattgattgcatctttcagctcctggtacttaatgcaaagataaagtagtgggaaaaggttgtcatttgaaataatggaaagatgagggagttttgaagctagctgggatttttctgcctgttaatagagtgacttggattacagactataaagataaagagtagggccgttgcatttagtatggatcatgatgctgattgctgtctgagcaacctctgtactaagggaggagaagctaacatccccgggcctggaagatactggatactagctcattaaactcttgtgagaagccttcattagcattatgggaagacttgctgtatctatattatgaaggcatttagattttttttaaaatgcatgttcttaacattttttgtttattaagtggggcagtagattaggactgaatggatttgattctctcatcctacatagtgtgcccagaagccagaaggtttcccagaatttgtattatggcagcgagggcaaatttaattagcagataggaaaagctttggagcagtttaggccaatccatttaattgtatcagcaattaatattttgagaaaatggaaataattaaatttacatttcttctaggactttattttgttatcctttaaggttattgtaaatgaggagacttttgaactcacagactaaagcaaactacaccagataatcattaactttttctattgtgtgccacccttcccaaccagattgttccatagtatcacttatgaaccaagaacctgtgagcttgcaaaacgcatttttaaggagtctcaacttttctgatttgtgttaaagtttaggtgtgggtcccagaaatgagtttcatggaggggagagcttgtctctctgggtgggtaatacaggggccactgggggctcactgtggctttctggcacagacagttatgaagcaggggttactaaagtgggagagagcagccagttctccagcagccccagtgagagctctcatggatctgcctattgcactggggtaggagccatcaccgtcagcttttctctggcccacagtgccattttctgattaagctgagacctctgtaatagacacgttgtcattttttcttgtgtctaaaagtttgcttgactgcagtgggtctccagctcagagcaggtctggctagagaaaacaggaggtgatgactggagcactttgcccttatggaacgtgctctgatgtagaaagcaagaggattttccttgcagtcactgaaggtaccttgtgtacacagaaagaagacagagggagccccggatgcctcggtatccctcagagccggatccttcagacctgtgcagtacctgtggatttggttagtcgatgatgcgctgccattaaaacaaaggcatcggccctggaatagagaagttcagtgagaacctctgtactccatgggcattttctaggaaataatttcacctgccctgtgtaattctctggaagaatcacagtgagttggaaggaaacttaagacttggaaaaggattgagaggttagcccagaccacaccagggctctgaaggcccagctggggttagaacctgggacaccctccagcccactgtctcctgttccctggccatttactgccccactcccctttctactctcaggggccctggatctaatgaggggattcgtgcagtttgctgcactaatacattgcaagtggtgccaacctaaaggtattctgatggtggaatcagagcagtagcatcttattaggtcagaatctgtatctcctcttccaagatttttacatgatttagtgttttctgaattggaaaaaaacaaaaacaaaaacacacaaaaaaaccatgtctaaatcctagcatttcatcccatgttgatgaaagggcatcttttttttcccctaatctgtggttagaactctcagaaacttttagaagatccctcctatgttttggaggtttgcagatttgaaccccagttcctcccacagtgcttctccaactcctggaatgaggtaaacctccaggcagcctgttgacccaacccatgcatgccggtctttgggactcctagatgtggaccctggagtgaatagggatcaggtgggaaatgagttcctttgatgaagatccttgtaccagtgaactgaccccactccccgtctggattcctgtggtgattaccctctgtattagtctgttttcatgctgctgataaagacgtacccaagactgtgaagaaaaagaggttttaattggacttacaattccacatggctggggaggcctcagaatcatggcaggaggcaaaaggtacttcttacatggtggcagcaagagaaaatgtggaagaagcaaaagtggaaaccctgataaacccatcagatctcgtcagacttattcactatcatgagaatagcacaggaaagaccagccctcatgattcaattacctcacctgggtccttcccataacacatgaaaattctgggagacacaattcaagttgagatttgggcggggacacagccaaatcatatcaccctcttagcaaggactgtgttcgtgatcatgactggcattcactgaacaatgactaggtgccaggcacctcgccagtattctttaatctttgcacagtctgtagggtggatatggatattactgttccattttttgtggaagaggaaatggaggcaagagacctgattataacttgtgcaaggtgccatgcagctaagcagccagcccaaatccagacctgctttcctatgattttcctgcccattactctcccatcgtagctcacctaatacttcctagtgggctgctgctgaacacacacccagggatgacttagtggcttgtcttgctctgaagaaggctaggcaccatgttggatgagttcttgaagatgtcttgctctagtcaagaaacttttaaatctttggagtttttgtccacatctgcctagttcttagtaaacatgatgtgggttctattagcatggcgccctccctcccttcctaccacctttatatgagcggagaacatctatgactcttatgagaaaggaaagatgaaaatcagagtgacatagtatagttaaattgcagatgcttaattataaaacagcttgtttctgaattttaattccttgcttttctctgactttttaaattcccctccttaggcagaattcatttttacattgatgattttttttttttttttttttttttgagatagagtcttgctcttgtcaccccggctggagtgcaatggtgtgatcttggctcactgcaacttccgcctcccgggttcaggcaattctcctgcctcagcctcctgagtagctgggattacaggcatctgtcaccatgcccggctaattttttgtatttttagtagagatggggtttcaccatgttggccaggcaggtctcgaactcctgacctcaggtgatccacccaccttggcctcccaaagtgctgggattctaggtgtgagccgccacacctggcctgatgaattattttcatgtgtggaacaaaactttgatgctgatcagtgattaggtacctttgtttggttcatttttaactaaggagatttctttctttttaaaaccattctttaatcttgtaaaaatatcatttaatgggtggatgttttagctgtgatgaatgacaggttgtcgtaaaggaagaaaggtatgtggtttccagtaaacttttaattcttttgcaaaataaaaataacagtcgtacagagagtaaaatatatgaagagtcaggaagtgatttatcaaaatcagatcttggactgctggttttaccatgaattaggctcttggaaagtgattgggccagtgtaggtttacattttttttttcttgttttatttgtcaaagcaaacttgtggttgcctgcccgtagtttaattctgcctcctttgggcaaacaaccgacttttactgggagtctttctcagggagataaaggtgcaccctgaaactctgctctctgattcctcagcaaagtcagtcctgagtatggggcttgggtgtctctgcaaggccttgcaagtgagatgggctgtcacctgagctcaggtggggctgctcctgccttggacagcctccccagcttctcctgcattatacccaggggctggagggcagagagcaggtcttcttctgctggtcggggcagtcacaggctttcctctcggcctgcttgtcctccgggtgggtccagcacccgctgggattcctgtgggcttagtcactgtgtggcggcggcagaaggactggggaaaccgccggccggccctggtgcgctgtcaccccgaaggaatgcgggccaggccggggctgctgggcctggaaagttctccagtccctgttgcggatctggcctgccgactcaaagtaaatctctcttcccctttatttcccatcaaataaaaaaggaacacgaggtagccactgtactcactgaagatgcattgttttttttttttttttttttttaagcgagcagcagcaagatttattgtgaagagtgaaagaacaaagcttccacagcatggaaagggacccaagcgggttgccctgaagatgcattttttaacttgctttttaactaagtatttttgctctgagctttcctggatctgtaaacacacccccagctattcaagatgggcttcttggtgaaaagtgatgtgtcctaggagaaatcacgcctgttgttgccgctggccatcacagatcccggtgcctgtctgtgaaaggctggccgggctgggtggggatgagaatggtcgggttgtctagactcagcctggactgtctttgactggaggggcctgagctcctcctccactgctcaagaccccggttaaggggacagcagagcagggatgagaagtggccctcttcacatcacctcccagcaagagggcctgacttagtgctcccaccattgccagccccagtttcagggtcccactcagttgtatttgaataggtctcatgacatgtgctttgcttgaagagcggctattagcagcagacgttcaagaggctgagctcaagcaggtgagcatgttctgagccattgtgaacccagtgaggtgcctatgctgatgcccagggccgcctgggcggggtcaggcccccatcgcttcttcatcctagctctgggagtgcattctgcactctcccgaggccagctggtggcctttggtgatcaccctctctgtaagtttttaagtggcttcctttcctctggtggagaagccagcacctttatcctatgacaagaaagctctttgtagtaggtggtagtagaatcagacagatctggcttaaaatcttggctgtgctacctcttggctctgcacattggtgaagagaatttaccttcctaaggcctctcagctacacgactgtggacactcagcttccttctaaggtcgttgtgagaggtaaagaaaaggggttagtccagggccagacatggcacaatgcctcaatgaaatattagctgatactatcgtaatttttaaattcccataggactcactgttaaaggattacaaggctgacacaaaaaatactgcattttgaatttgtgtctgatttatacatttccaaagagtggaattctcactacaacagctgttctttgaaaggttagatctttgttctgagataaattaagtggaaaaaggtgtagagcattatatgtactctgattcttcagggcttaatttaaaaagagcatgtttgctggtgaatgctggttcaatcattaagaagtttttgagaaggaatcccagaaagtaataagcacttatttttcatggaaaggaaccggaagtgcttggtgacctccacaggtaatcttgtattatttttgcactgtttggaattttttaaccatgtgcttttatttcttctattcttttcaaaggtcagtaggtgttatctggacaatagggttctggtctgttttctgttttcttcattgtactgtgcattaagaaaaaccctaatgtgcttttttttttttttaagtgaacctttccacatctcattgtccttcagtgagagcaggctgtgtgtgtggtcttggtgaactgtcccgttccctggagacagtatctgggggcctccctgcccttcccagtaagagctgggccttcacaggaatagaggcctaggattcgccttcatcctcttgaagagccctaacagtaggtcctggctggggtctggcatagaatgcccttggcacgatgtgtgtgagtgtgtctttccttagtaaatggccttgaaaatgccatgtgcttctggcaggcctggataaggtttgccctgcataacccttggaaagcacagttctcacttgtaacaccctgtctgcaggtccatgatattgtaattaaaaagttatgggatcacaagggcctatttaaagggcatctggtctaaaggcacagttaaaagcagaatttgtgtcagtggctcccttaatttctcaaatatggttctgtttctaaattcatcccactggatgtctgtgttgagttttctgttgatgaaagaatgtttaaaaatgaggcagatccaaattctaatgtctgagtgtaccactgcttaattactttgggcaggtcacctcacctctcttggaaagaaaggtgatatactacatctgtgattttcaatttttttttttttaactagacccacagtaaaacatagatatacaccatgatcccaggacagaataagtatataactaaaataagtgttttgaaatcacttcttgtctgacacagcactcacgctttctattcatgtagtaccacgatactttcttctattctaatgctggtaagagatgccttaaactgattttgagaactaccaatgggtagcagctagcggcttaaaaaggatgttattaaggtccttttcaccctgattttgactctgttggctctcagctgagtgccccatacttagtgcacatagagttggcctctgaggtcagcctcctgttttcctgtgaaaatgaggatggaagagagtcacttgtttccctccttcatggctaccccctgaggactgggaagaatttaagaatttgagtatatgttcccaatagcatgatgtgtttcattgttcatctgtaagcatttttaaatattcgagatctgtatcttgggtaatttttatcaactttttatttgtaaaataatttcaagtcagttattaaagtaacaaaaataatggcaaacttgataccttcccgtatttttttttcatatttttccttgaatgcttacaaaaatattaaagaatattatcacatcattgtagtcaccgatgaattattttctggtggcttatgattagaagagcttgactcggagtggaaacagataacatttgagtgctctttctgttaattcatccttgtcaataaccccattagctaacttccagcaaggctgtgttaggaatgtggaatcaattagatgaattttgaaaataacttggtctgttctaaaaggccctatgagattcaaactgttgtggcctggtgcctggtaactttgatggccattttgaaatgttaccgtagtgataattcttctggaatctcaagtcattaaaagtgatatggctaactctgggccctgtgctataaaaatagatgtcatgggatgtgtgaatcctttcttcagtgttatagttaatagcaactgaaggaacgttttggtcaaatcccgaatacttattaggggctcactgcttggctgcatttttctcctctgcgtaaatcatctatccatgtaattattaacccctaagaatgaatagcatttttaaaagggttccattttcccctcatatgactttggttcattctcctccttgtttctgtctctcagtgaactttccaaaagatgggttatgatgaaagatgaatcgtcgttgataactgctcttacttatctgtgtatcgaaactgcaggtagtgctcttcagctctgtggctggatttagtgcctcttctagggaggggtgggtgttggcacaaagcgtatcccatttccctgaatgtcgtgtggacacgtgagaggacagtgcaccctttgggcttggtgctgcccccttcacgctactgaaccccagggtcataattaaaagctgtgttagctcttctctggttagaggcatacaggttggaggcttgtacatagccgtgagccggttggtctaggccaggaagcaaaccattggaaaatgtggttagcagtgacagttgacagcatgtttgcctgcagtagtggtggttggtgctgcgtgttgactggagttgcttgcattgggagagcctgacttggccaagtgtgtagcttgagaccagttggattcctctcacagagacagtcttcacccccaagctctgggtgttgggcgtgcagcattcgtattcagcaaacatttgctgatttccgcctctgcaactactgagctcagctttggggatctgaagatgaatagacacagccacacttctggggaaatctccctgtggggaggctgacatggaaaccaaccaaatgggagtgtggtgcatatcttattagagctttgtgcaaagtgccacaggaagcaggagaaggggtagattggtgtggagggggcaggggaagacttgcctaggagcagggcctcgcaggatgcagaggagtttgccaagtaccagagattgtggggtaggtgaataaaggctgagtataaggataagtcaattcaggcagatgtcctctaagaatgaaggtgagaatgctggcggaaaccagttgtggccctgtctgccttccctaggagactggacctgactttacaggcagtgacggtgaagcagggcagtgccacgagcagatctgtgtttcctgaagggtctctggcagctgtctggggaaggagggaagctggcagagccgtgggtggaggcagatgccattgctatggagtgagcatggggaagggggtcggaggccttttggagatagatacagcaagacttggtgaaggatgaagttggggcaggtagaggaaaagcaatgagcttacggatgactggagactgactggagaagatgaccacccttgccattaactaggataggaaacaacaaagggtaggagtttgacaggggagaatgtttgtgctgttgagttgttgagtttaggtgcttgtggcacgagcaaggggagtgagctggtctaggaggtttttggaaacactgacctggctgcagagagggagatcctgggacacctgttttgggagttatcccagtggggaaggatcactgggaagggggccacccctttgggaggggtcagtgggacgactcccaagggaagaggttggttatagggagttaaaagaaaggagcacccctcacgcgagcccatttttcaaggatacatgtttgtcttttagattctataaggagtagctgctacacagaaagatgtctacgtgtgggtgaacacctggcgtatcccatgcagggaggcttcagcagaccttggtggcgatggaaccaccacagtgatccgaggattgggtctgaaggctcctccgagtctccaataaaaggggttgttttgaagggctcaggttcttcctgggcttttttgggacagtcttgctctgttgcccaggctggagtgcagtagaggcaatcatggcttattgcagcctcagcctcctgcctctgggctcaagtgatccttctgcctcagcctcctgcgtggttgggactataggtgcatacccccatgcctggctaatttttaatagagatggggtcttgggctcaagttatcctcccacctcagtctcccaaagcgctaggattacagacatgagccactgtacctggctgagaaggtttttttttttttcccccttccaaacccccatgtggtccagacgaggccagaggatctcaggggaattccctctccgaggagcctccactgctattgcatggcccccagcatagtcatttgagtgaagagccctccaaaatcattaagctgatttgtagaatcagtttgctgtctgactacctgatgaagatgagaagtggtagacctccccccactgtaaggtcttaacaagatctaggtggaacatgggactgtttgcaagctacttctgtttctgaaatcacatgcttgggatcccaaataatctactgaaagctgtcttcgggaggcaaagcccagggatttgttttgtttgcccctaatcatctcttccatcccctttctcaaaagtcttatatctagataatttagtacatttgatctactaacagccagggccataacaggagctgatattacataccccggaagtcctttgcaaacacactgtagtggcgattgattagtgttccgagccataggtaacattagcctgcctcgtaggaccctcagatgctgaccgtatctgctgcaattcttagatgtaaaagagcgcgcatcgtataaatcaaaactagatgattattttcatttgaaattgttgttgcactgtaatttctcagggttttgtattttccaacagtggtgtcacttaatgggaagatcgctcaggctttgtaactgggcataataccaggtattctcgtttaggcattctgctcagtagtattaacctgaagccataggacatgccaatgtttttttccgtgttttttaaaaaaattaaaatggttggctacaaatgcatccttttttacttcagagtaagtcggccttggttaagtcttaatatttctcatgcctatttttttttcttcaaatgaaaacatacggagagaaaatagcatgtttatgccttttggttgtacccagcactgcccagaatggcttacagagtttatacccatggaggtttcgtaaaggtgacattaacttcgcagtaaagtcactgaccccgaacctgtgtcacttcaggcttagccaaatgctaacagagcagctcaaagcttaagcagaggtatgtgcttgctaagtaagtgtgtgttttggactaattggtgactaccattctgaacattaactgccctttgtgttttaatgttgccaggaggccgattgtgtaacctttggaggcttccctgagtttggagaactgaattcatgtggtgacttcctatttataatgtctttgggggagctatgaaataacttttcttctaagtgtgatttttgcttttttaaaagtttttatgttgttgtcaattgggtatttcccttctatgccaagacgaattgtaggttcaggtttctatgcagcctgtatgtaaacactggccctaaagaaggactctatcactctactttcagtttcttgcattaaaacaagtatgggtagcggtatccttcttatttctgcttcctggtcctgtgtgagaccctgaaaggtcctaatggcagtgctgattagattgtggccagggttcacccacaagttccgaagctggggaaggtggaagtgctgttaactgacttgtcccatgtctggggttttgcagcctggggagaggtgaccacccctcgtttcagtccaggtagggttttatgtccctgtcaaaaatgtgttgtgtgaagtaccttgactttcatttcccagggaagaaagcccgtttcaattggctcaagcggaaaagagcactgtgggtccacttaatggaagagtctaagagtggcttcaggaagtccactgggggctccccgtgactctgcccacctgcatattgtcttcattctaaggatccatgtggtagcaaaagggttgttacaactttaaccctgcatccccaccttcaggttcagtacccaagggtgagcaatctgttccagtggcacagacctgtttcaagaggtctctagccgtgatagtgctaggccactgccctccaccagtgtgttccagagaaagatgctctgatgtgccagcccaggccatgaggttcccggcctcagtaaggaagaaggaggacaaggtggtcccttaggagaaaatgtggatattcaagaaagagggtcgcaaaatagcaaacacccactatggctgggcagtacagggttgcagaaatatattttgatgtgtgatcgcattggagctacttcaaagagcaaacacaccactttgatttatttctcttagtgatacagtatttagagagggagatactttttatcttcatgggatacttacagtggtgctctagaagccatgtactgcttctggcttctccttcctttcctccaaggctcctcctgcctcctcccaaagctctgtgccctgaaagagccttgagccattgctcagatgtcaaaattgtattaagcagacacatcaaattaaaacttttgggatcactcaccaatatggtttcctgtacagtactgccctgaggggggattacaagtagttatgcatccatttcattgatgtatcatttttattaaaaagaaaaacaatccaaccaagagaggaagtgtagccagctgcctaaagagtggcgatgatgggagatgatattttgattacattaatccatatcctgttagttcactttgcttctgtcgctgctgctggtgaagttactaatgtgaactaattacatttgctctgaaaagccagaatttttaatgcatctcagcaagaaaggttaatattatcaatttaacagcatgaatgaaacattgtgtgtattgaacttgaactgtcctaaaagcttggataataaaaacccagtggcttcttttataactcactggataaacagttattggtgagacatggataaggctttcttctctttcagttttatggggggtggtaggcagtcagcattagatgctgtctgtttacagggtgatatcgtaacttcgtgaaattggaggccacatttaaaaaggcactccttccttttaaaagctttgcaagggggctgcatatattttcctaattagtgggaatattttcttttttctttttttttttttttttttgagacagagtttcactttattgtccaggctggagtggagtggcatgatctcggcttactgcaacctctgcctcccgggttcaagcaattctcatgcctcggcctcctgattagctgggattacaggcatctgccacctcacctggctgattttttgtattttagtagagacgacgtttcaccatgttgcccaggctggtcttgaactcttaagctcaggcaatccgcctatctcgggctcccaaagtgctaggattacaggcgtgagccaccgagcctggctggtgggagtattttcaaagagaacaacaattcaccacaccccaacatggtaacagtctttttgttttagaagcatctgtgaattgccaagactcgtagaactaagatgtattcaaagtcagtcgattttctggaaacgacccagtccctgaagatagtcttttggggagttgagtgttttgagagggacaccccctctacagggacttaaaatggaatggctttttgtgtgtgcacatggtacctgcagtgatttcttgtgtttaattacttcctgcactcatctgacttacacagtggtaaacaatgaggatgggaacaggcggcagctgctctgtgccatccaccgtcttgggaaccccagcgtggcattctctctggggcagcatgttgaagtgtttggctggtgacattttggtgaccagttggctcctcattgtctttcaatgtggagattaggaaccgagcgaggatttggaacccttgcgtttgttctgccaagaacatgacttgcctctggcctgagagcagtggagtaagctgataggagctagaaatactgttttgggtaggacttacccaaaagagtgggctgagtcacagaactcccaagtttgagccctgtcaaataaattctgaattgttctcaggtatgtttctcaattggaatttttttaaaaatttaatttaaaaaagacttcgaaaagttaccttgttctcatttttcttctccctctttgccccgtccccacaatatcttagggcgaagaaaagcaggtttgagaaaagctttttttcatcatgtatttgtaatagctggagcctgctgagatgatgaggtggagtggagggagaaagagaccttgaggaggtgtggagggggaaggggtggaaagttctgtcgtcttctgtgcctctctctctctcttgctcagggtctccagtcagccctctgggtttgtgcccttcgtgctgcactgacaggtcaaagccgactcaggcctttgatgtctgctctaggagcaaaagtgattcctggtcccgcagccgtttccactgccttgtgtatgaaggtctgctgctctgaggtggatggtggctctaggcaggctgtttccgctgggtgcggttgttgctgcaggtttttctatatagcttggtcatgctcctgtatctagattaaaatcctatgacagatgggcctgcttatatctaaacttattcagagagtcttatgataggcaacaggttaccctttaccggggtaaaacatggtttattctacagtttggtcccgttgtaaggccaggagatagagtctcactagtttgccccggctgaactcaaactgctggactcaagggatccttccgactcagcctcccaattagctgggactgttggtgtcaggcacacaccaccttgcctagcttgaagatctttcttctaaatgagcgggctttaaagtgatcagtgggacctgggcaggttggctcttgcctataatccaagtgctttgagagaccgagacaggaacatcacttgagcccaggagttcgaggctaaagtgagctgtgagcacaccagtgcaccccagcctgggcaacagagtgagactctgccccaaagcaagataaaattatcccacaggattttagtcctgacttgtgtattactatgcagttgtgtctgtgtgaggctcagattcccccccatttaggatttgtgtggctaaatctcagatctcattttcaggtgaatttctctattaaggttataaaagaccaaaataactggaaattcaactctgtacttgaatacttggtaatgcccagcattctcttgactatcccatttcacagtttgccggtcatttccccagtgtactcactggattcttcccgcagccatgaaaggtaggtataattaactccagtttacattcaggacaatagaatgttcgtcaaaatgcttttgcacatgttttctcaccctgagtggctacacttgtacagtcataccctccaaactctaagatgtatactcttacataccaaaacacaaagaaacaacaggaagtaagaacaaaactcaagaggtctgagtgacatcttgccttgcttcacaacttcagagtttgcattgctttaaaaacattggttataagtgagtgtggaaacagtgtgttcactatttttatgctgtggctgtgctgtgcaggagctgggcttttcgtgcattttagacagaattgaccttggttaatgcttgacttgggaactatgcagaaacatccaggaagtggtggtggctgatcctgaccgtcctcagttttgtgaagcaacagcctctgtgcctctttctctgcatgctctgttgacggtctagtcttgagagagaacctgctgctgtcccgtctgtcgtagccttcctagcaactcttaggcctgcatgctgtgttttcatgatctcccccaaagcggcactttgatgttttttcagagtcaaagtatcactgtggatatttatcccaaacaaaattgcaaactgatcaaatgttatgtcttttgataccaaatcaaaaacgattcttggtggctgatcaggttgtctcctaaaaatttgccttttgaacctatactgcctttatgagatgattatgaaagtagaaaatagcctgtgaaaaatggtacctttgctaaaaagaaaaaaaaattttttttgaaactaagagtctctgttgtccaggctggagtgcagtggcactatcttggctcactgcaacctctgcctcccaggttcaagtctcccgagtagctggaactgcaggtgcacgccaccacatgtggctaattttcatatttttagtagagatggggtttcaccatgttgcccaggctgttctcgaattcctgagctcaagcagtctgcccaccttggcttccgaaggggctgggattacaggcctgagccaccgcgcctggcctgctgtaagaaaatattaaacttaggatgggaaatgtgatctgaacaggattcctgtgaaggtacccagtgtaggtcttagtctcctctccagtgtacatttatggaggggcaagatttcaccattctgtgaagaactctgcgtgttgacgactgctcacgcctagggaataaatttcagagcatgcgtagatagtgccattttctacttaaaatactataatccattatttacttcggaaaataaaagcattaaggctgaaagttttgggttagtaatcttgatgttttaaaatgccttagcattccttcatttgttttgcttgccacgtggttttgctctgatttacacacctctgtgcatggctaatccactgtgccactcttggggctttattaactcttctctgccagtttttcccttagagaatatcatggccattctctaagatgataaatgggactaagagtaaatgcaggctgaaaaagcatttaacaggtcaaggatctgaagcttttaagaaggcaaaacaataaataagaaacccaaacagagtcttgaagcacacccatcgaaacccaagtttcagaatttgctgcagccttgctgccaaatcacagtaaaagctgaaaaggcttttgtggttagttacgtgtgatacaagaaatcgatgtgtctgagagaagtaggatttctctttttgagggggaaaaatacagcaaggggaaatgttttattaacaataaatatgcggcttaccatatctgtagggcacagatttggttagtagtattttgaaggcaggataaaggaagatcctaaaatctctgtgctgtgtagcttccattcgagctgcacatgttaaaaacattctaggatccacacagtttaaacaaggtggctggcttaggaaatgcttctccccattccttggcatccccacaaccctattctcctactttctcttatgtatctggactggcttttaaaagatatttagtgaaatttaattttctagggaaactccactttgtcaaaagtgtagtattcctcaaggatagctttgctggtcggcaaatctcagttgagtgtatttgtggtttaaaaaaaattctttctgaatagaaatacaaagagtgataatgtttaacattttattttttaaaaagctttacgctgtgtaaattgtgggttgacttcatgtttctaaactttgtcttttagaatgactctcttgggtaaattattagcagacactctcgtgttgacatgtccattttcctttccattaagctgtctccattgcagttctgttgatatggctttatatagttttcctgagcttttttttttttttttttttttttttggtaacaagatacctatgcaagctgaaaaactcttggctttttagtttgtatcacttccagaaacttttagatgctacgtatagaagtggctttcttttagggttaggtaagatacttccttttttggaaatagttttgccatttggtctcgctgcctgatttgtgctttttcttcttcagcaggtagtaggaggctgtgtattgtattgccttttaccagacacccagaggggtcatgttggaaaatagcatcctcttagcaaaaacacaatcccttctctgagaataaattgccaagtctttccaggtcattgatggactctcaggtgctgcatttctgcacgtcggggaacaagggtgaagaacagagctagtccagcactgctccgtcctcccgcatttcttcttctgtagagtcttttgcaaactagagagtcttgcagagagttgttgggttttcccaggagatactgtatgcaaagaattgtcatgaagacataaaatcaagtcttggtgtaaaacttttaataaatttaaaggcatgtctctgtttttctcctcctctatggggattttcatgtggttagtaataaaactgtaggcagttgtatgtctagatttctatgtaatttgtttgtgttcgtatatgcacacctgtatacatgtgcacatgtattcaagaaagacctgcagtatgcttgaaaggattgaggtgcctagtttgtggtagtagctgaacagagtgggaggtcaaagttaagtcattgtgaggcaagggaacttgacttagccctttaagaattggtctgtccctgctaagccaaggctattagtgttttcttccctagctgtgttctgaaatggttcacctgacattcagctgggttgggggagaacctctttaaacatcagatcttattccggaggagtgtatccagccttctcacagcatatcctgttaaatatctgttcaaggttagcctaggcctggagtatggacagcatgaagccagatctaaaacagatcagttcatggataaatgatgaatttaataaaatttgaaaataaaccccacataactagtgctgctattgatcattcatatagccagcaggagtggtgagaggcttggtctgcctgaggtgtggagatgcttgtggcggggggcaaggtggacgagggctggggctgctcctggagcatctttacgcgggtggaggagctctgacacagtggcagtgtttgtaacactttccaaagggattaaaataattctgtagagttaaccctaggctagtgtggcttgatctgaaacagtcccagccagaaggtaagaactcctgtgttatgttgttagcatacaatttgctgaagttcacattttaaattttatatttaaaaaccaaaaagtagtactgatcattttggactgtttcaaagtgatattgtttttacttgttacaaacattggcttgcctgcatctaattgcactcacaatgggccggatgtggtggcttacacctgtaatcctagcactttgggaggctgaggcgggtggatcacctgaggtcagaagtttgacaccaacatggtgaaaccccgtctctactaaaaatacaagaattagccaggcttggtggtgggtgcctgtaatcccagcttctcgggaggctgagacaggagaatcacttgaacctgggaggaggaggttgcagtgagccaagattgtgtcattgcactccagcgagtgcagtgtaaatcccttaaggaaacagtgtgttgtggtaatcgtgatatcatagtaaataggttttgttcgttatttttttcttttacttccttttctaccagtgactagtcctaatgtgttctaacttttgaaaataaagtacaaattagatggatttaaacatacgggaagtaagacggaaattcattacttttaaaaaacaatttgttgtggataagatttagaaatggaaacacaataaactgtgtttccatgacacaggtatactaccaagttcttacaatgtacctttgaggtaacgaattttcatgtcatttggagtagggctgggccagtgagtcactcatctccttgttcattcattacgtgaatacctagtaaatgcccactaggcaccctggagtcatttgtgtagagtggcatctctatacaactgttcgactaactgtcggagacaccctaatcaccccagccacaaacaaatagaacattgtatgtgtgctgaatcccacaaaggccagacatgatgccatgagaccaagaaggaaaagaaataatgtggaaagggtttggggtggaaaggtggggaacctggaggcgggccacatggggccccagaagccatgttgagggttttgtcttcaccaaaggatcagtgggagattagtgtagaacattaaacagaggtggggtatgtgtcatatttccattaaaaaattcatcctggccacagtgtaaagaatagattagggaggaagccaatcaggaagcaattggagtaggcaatgcaaaaggcaaagtgaacttggactagtggtggagataagttgactgcagagagagtaggaagtaaaattggccaggcctgtgttgggggtgggcttgtgagcaggatatcaaagataatgtccaggattctggcttggatgacaactatggcaatgcccattactgagctaggagatgctggaggaagatcaggtggggactgtgagcatgagtttgatttttgcagatactgggtttgagacacttctgagtcaagcaggcatttggaaatgtggactggtgccgagaaggaattcccagcagtgacttggtttaggtggtcctggaaagtagaaacacacacgagataattctggggatggagcttaaagggacgtcagcgttcaagggccaggtagaggatcatgagctgtaaagggacccaggtggttccagcacagcgaggaaagcatgcgagtgtgatggccaggcttccagggagagaggagggttttaaggagaacaacgtgctaaaagccactaagaagccaagcagagtgagaaatgaagacctccactgggtcttgcaagaggggaggcctttgaggacctcacctgagagctgatgaatgaagtgatggctggaagcagctctggagagggaggaatactgtggggaggggaggaactgaagaagtagagaagcatggctgtgcacaggggaggtgggatggcagccagggaggagcagaggtggaatgtggatcttgttttccccaacagagatagaggggggctaaaagtccatggaagggactctgctgagagggaagggtggatccatgagacagaaggggagagctccagtaaggacccagaggtctgaggacaggccaaagcacagatggagggattagctttggatggtaagaggaaggacagatggccccttaaacatgacggtaatgcaaactgctctgttttttttttttcttttggcgtttgtgatgaactttgtatatgctttccttgtttgatccttatcaaaccttatgagaagaaactaccattctcctcatttgatggatgaggaccctaagccctggagaggccaggaaacattcccagagtccctcaggaggaggactagtgctgggctcctttcctcctgttctgctgcctctgagaggagccaggattgaatcgtagccttgtcctctgacctggaggtctgggagtaactctcttatgacttttttagcctagtagaattgaacatgaacttcatgttttaagggatggttgcatttgtttgaatggtcacttctttttctatcagtattagctaatatagggagaaggaagtcatgcttctcaagtaaagcaacagtatctgtgtatccatttacttgattgagctttctactgaattacaggagttaaattatactttgttacactcttggtattacaaaatgatggccatgcctttattataaaatgacaccagttattctttcctggaggatgtgccttgtgtcactagccgcactaagcacttccccactagtggccccatgtggttgtgtgtcatcgctgactacctgttacaggtgaggaagctgggtggtgcagagacagaaagccggtggcccagtcaggagctcctaagtggcagagccctgtctcctgggttccttctcctgtctttcttgcctctcacttgaaataagagaggacatcagaactggcctgaatggggccctggtagggcaggaacaggacacctctgtggttttgttatgatgtcctgaggataaaggagtgaaaaaaaaatctttgaggaattgaagatttctttatgaaagatggctgaaactcctgacagcttttcaaattcatctttggagaaacttccgttttctctttcctgttccgaggcttaaagctgccctgaaatctacacatttatcaacagtctcttgtcaagactccagggagacaagaactcttatacattgctgttgagagtgtaaaacggtacaacctttatggaaggcaaattggcgttataaatgcgtgttacctttgacccagaaattctacttctaggaatttatcttaccaatacacctgcccacatacaaattgcagcattgtttttgatagtaatacgttagaaataacccacgtgttcttcagtgggagactggttaatacactaagatatatgcacaaaatggaatgctctgctgctgagagaaaccacaagtatgccctgcacccctgtgaatagatctccagtatattaggtggagaaggcaaggcaggcttcttttttgtaaagttaaggagggtaaataagactgcatgtttgcatctgcttgtatttgtgcagactgacactagaagggaaaccaagtaactgaaaaacacgatgattcaccggggtaggtggggaaacatctaggtcgggacaggtatgggagtgacacacctcagtgtacatctttgtatcatttttaaaagtctgtgcttgcattatgtatcaaaacttagtgctatctcctcaggtgcagggttctctggaactctgtctaggttggtctcttggatggcattcttggagacttgccggaaaaccaaacaaaaggtgtgagtgcatgcctcctggatagatgtctttttagtgtaacttagcacaccttgtacactgtcagggcgcctctcagatgagtcatcccggcagcccctgctccatgagtgtcttccccacagtcctgagtgcttctaaaatcatctacaccagtggaggcaaaactagatattttcttagtttgcagaaaggaatatttccagacaacatgaacttgttctcctttggtctccttttccttgtcattgttcaagtcacaaggtctgctgattaaatttccccttgggtttcaaaagaacttgcttgtttggttgttgtgttttgccttttaatttgagagttgaggcccccaggtgcatgtggtaaagaattcaaagggctaaatgggtgtgtgttgttcgttatttctttgaacctcttggcacttgaatggtgtcagtaatttcactaattatggttggcaaagaaactctgacacatggctttggagctgtgttgttcttacatcatatctcttgagttgaacctatgctctcttgatggatgaactcgtaattcaccaggtgcgtggatcgctgtgattaattgtttcaagctatcagttatttaactctctagtgccaaatgttcaggagaaaatgtaagtgcagtgtaatgtaaaatcaagccggcaactccagcaatttgctcttcaaactatagctctatcagttcccattcatttatacacttacactactcaatttgtcgttgttgttgttgttgttgttgtttttgagacagagtttcactcttgtcacccaggctggagtgcaatggcatggtctcggctcactgcaacctccacctcccgggttcaagtgattctcctgcctcagcctcctgagtacctggaattacaggcacccaccgccacacccagctaattttctgtatttttagtagagacagggtttcactatgttggcctggctggtctcgaactcctgacctggtgatccgcccgcctcggcctcccaaagtgctgggattacagccactgtgccctggcactactcaatttgtaataaatcagggtaagttatttttggtgccaagtcgattaattgaatataggttattttgcatcttagattccctctgacgactaaatcttataagcagaggtatgtgagcatgagaactgtgtcgggtggtcctgaagagattagtggattagaaggagatttggagatttttaaaaaagcctctggacagtgagttaaatggtgggttgacactctgtggtcgggactttttggagagtctataaagttctgctgtatttctcaagagctagagagagatgatactatgaccaaatttggtttgaatgtattataatgtactgagtatcactaatttgttgggaaatgactgttaaaaatacttactgacgcttaaaaatatcacctatagcattagtataagtagccaactgatttacatatatttcatgtgtgtgttgggagaggggtgtggattcgttaggccaaagatttcggtaatatatttggaagagataaatgaagataaagagataaattaccttttgaataattccaaaactaaaaatgcttcccttaatttttatttctgattttcttatttctatcagagaaatgtttctcatgtgacaaatataatgctttcatatttacttctgcatgcacaacttttaattaagtattaattgattaattttttagagacaggatcttgctgtgtcatccactttggagtgcagtggtgtagtcatagctcactgggacctcaaacacctgggttcaagggatcctcctttttcagcctcctgagtagctggaactacaggcataagccaccttgcccagcaaatttattattattattatttttgtagagatggaggtcttgctgtgttgcccaggctggtctcaaactcctggcctcaagtgatcctccttccccagcctcccaaagtgctgggattacaggcgtgagccaccacatgcagtccgtgtacactttcacaccttttaatttctttactcattaggtgcattctttagcaattatgtgtaaagtggaaatgagcgtgcaaatcgtcattttctattgacttgcactccagaattggaaaattggaaaactgtaggaaactggaaaattagaaaactgtaggatctaaaacaaatcgcttctatgacttataatattcacttgtagaactcactggcctttgtcagctttcagagtatgtgaacactttttgccatgtaagtagttagtccattggcaatggatatatgtaagttggtatcttcactgcaaacatttagttaattgcgtttattcttgagccattcttgctctacccttaggacttgattttcagtagctacagtggttattccagaagttgttagaattaagagccaggaggaggtactatgtaagctacatttagactccactggacactcacatattgcacgtggaatatcttaaaggggttgtgtgctgtggtcagggtgggaattatctcttttctttccatgagacctccactgtgcattatttaagggcctgtcaattgcccgttattcaagttttgttgttcttggaggacactattgcctatttctttccttgtttaaaaaatttcatttaggtaggcttagcatagttgcagtagaatttaataaatccttttttttttttacagaataaatctttttattacgtaaataccctttaatttgcctatttttaaaattcttgtttctgtgcttaccttgttgttagacagccaaggggatatgctgctctttttagtgccaaggtaaaaggtaaagctgtatcttaaatatttgtatttctctttggtcttggtgacccaaagtgatttgggtcattctgacatttaatcaagtttaaacaacatggctcttagaagtatgtttaccaggtaatctgagggctggttacctggtaacgcaattgagaaatttcatcaagactaattgattaatttattaagcacttattgtccagtttgcctttaattttcatttttctaagtttccattagctatcatggcctcacttgttatttcataatgaatggttacaaattgtttgtgtgtttttgtaattagaatgtaatagcaatcgtctaccagatgagctgacattgtaatgacatgaagtcagtaacaattatgccttacaggaaaattaattctgtaatcctatcatcccatattttgcctaagagattcgatttggctgctgctaggctgcttaggcaggtgacagcatggtgggacacttctcatttttctggttagactacttaaccataacattcatggtgccacctgaaaaaataattttatcgttttagacttttaaaatatttttaggctttttttttttttggcttaaaaaaagaatctgttctacttgggtattttgttctccttatttcttagtgaacaaagatatttgctcgacttctatcccagaaggaccatcctttcttcttccttttccttacctctaagggatatgaagctgtgagagggaattgcatatagcaataccattttgattccagtgaaagttcttacctttctcttttgtcattctcaacctcttacctgaagagtccattccctcagtatatagagcatctggaagtctaaggtgcaggcaggactgaaagagctgagaaaggcctcacatcaggtgacactggggcacctggctgtgctcccttgttggggggtcccttggcctgggcagttttgcgcttctccctgtttccctgtgccctgagactttgtgggtcacaggcaagggggctggcctccctgatcaagggcccttggcctaggagggcccctggatttatctagtccagcttctcgtcgtccaggtgcaaaactgatgctctgagatgtttagggatttgtccaagagcagagttggagccacagtccaaatcttctgagcctagtatggtattctgtcatccttggtttcattttgttctgttcataaaaattgcccaaaactgctgggcaaagtggctcatgcctgtaatcccagctcctcaggaggctgtggagggtggattgcttgaggccaggagttcaagcctagcctgggcaacattgggagaccctgtctcttaaagaaaataattgcctaaaactattcagggttaaaaatttgtctctaagcttaagaatttggaaaaactcagaaaagtagccacctataactccagcattctgagaacagttaagtgtattttcttctagttttttgtttgtttttgagacgggatcttactgtcacccaggttggagtgcaatggcgtgatcactactcactgcagcctctacctactcaggctcaggtgatcctcttcacctcagcctcccgagtagctgggactacaggtgtacaccaccatggccagctaatttttgtgttttttttgtagagacagggtttcatcatgttgcccaggctcatctcaaactcctggcctcaagtgatccacccacctcggcctcccaaagtcctgggattacaggcgtgagccatcatgcccggccttcttctagatgtttaaaacaaacacattttagtgtagttgagcctctgatcgttacatgtttatttcctagcatttaaaagcctttcagcgacatacactccttattagcttaattttttcttttaagagccgtgttcttgctctgtcacccaggctggggtgcagtggtaccatcgtaactcactgaagccttgagctcctggcttaagtgctcttcccaccttaaccttctgattaactaggattacaggtgtgcatcaccacgcccaggtaatttctaaaaaaaaaagttttttgtagaagtgatgcctcgccatgttgcccaggtgtctgtcttgaatgcctggcttcaagcgatcctctcccctcaactctcaaaaggctgtaaccctgattttaatggtagtgtaaagtgacatgggatgaaggaaccgtaacattcttaaagtttccccattgttgggcatttgcattggtcccagttttttataagtaaagaaggctgcagcaaactctgttgtactacttaatctttgtcctttatttcaaattatctccctacaatacgtcccttgaaataggatttctgtggaaaggtatcagtttaaagctcttgacccatatggccaagttgctttccaaacagcttacctgttgagactcggacctatgcttctaaagcctatgtgtgaaatgttcacattgtctttgggagaagcttcccacgaataagaaaaataagggaagaacaaataacataattgtttggatatatgctgtggtttgtgtggacgtctcccaccctttcccttccccagcccaagtcagtcttctgtataaacaacttacataatacagactcttcactgtttgtattatacatgtattttgtgagtctgtgtcagtatttgtttacacgggaattagggcatcaggctgtcttcctagggttcctctgtgcagacttgtagacagtatgggttctttgcgtgctgagttgaggtggccccaaacctttcagacagttgctcagatacctggcagttgctcatttacccttccagaccttcctgcctctatattagccaatgacaagcagatgctttccacaaaacattcgtgtgtgaactgttgacatttatgactgttttctgagcccacaccaggtcatttttctataaaatcagaactgtgagagctcagggcatgtggccatcctggataatgggtcctgctgtctggggagtcgttttcatcaaaattcacttttaaagaatagagtgtttattaacgaaaatatgtgagccttggctgggcactgtggctcctgcctgtaatcccagcactttgggaggccgaggcgggtggatcacaaggccaggagatcgagaccatcctaacgcggtgaaaccccgtctctactaaaaatacaaaaaaaaagttagctgggcgtggtggcgggcacctgtaatcccagctactctggacgctgaggcaggagaatggcatgaacccgggaggcggagcttgcagtgagcggagattgtgccacttgcactccagcctgggcgacagagcgagactccgtctcaaagaaaaaaaaaaaagaaagtatgtgagccttatcccccaaatgtacctgacatgtgaataatatggctcaaactaatgatgtgtataatattaaattgactttgttattataagtgatacataattcaattttagttaaaatgcattatttcaatcaatatcaaatattgcagaaggaaaacctaaaatagtagccaaagttactcagatgagataaagaatatgtttagggctggaaaatcatactttttttttttttttttgagatggagtcttgctgtgttgcccaggctggagtgcagtgacatgatcttggctcactgcaacctccgcctccagggttcaagcgattctcctgcctcagcctcccaagtagctaggactacaggcacgtgccaccacacctaatttgtttgtgtatttagtagagacagggtttcaccatgttagccaggatggtcttgatctcctgacctcgtgatcacctgcctcggcctcccaaagtgctgggattacaggtgtgagccattacgtccagcctttttttttttttaaataaagagggtctcaggctggcgtgcagtggcacgatctcggctcactgcagccttgacctcctctgctcaagcaatcctcccgcctgagccccccaaatagctgggaccacaagtatgcaccaccatacctggcttttttttttttttttttttttttgtattttttgtagagacggggtaattctatgttgcccaggcttgtctcgaactcctggcctcaagcgatccacctgccttggcttctcaaagtgctaggattacagatgtgagccactatgcctggccaataattatataaattttgatataaattcctgctcttcaaggagatgtgggttttttttcctcctgagagtatatttataaagttaattggattttatacaaaagaagcttttgactcatttcatttagcttttaatgttatcatctgggaggagatggtgaagaattctgttagccaaaccatggcgaattaatgtttcttacagatggttttattactttttatgatattatttggatcatgaaacaagtatcttggaaaatgtgagatacaaagatgtgagttgggaggtctctcttgtatgtgagttccttctataacagagaaaggatactttcagtttaagctgagatgctttttccttttcactcttgaaaagtctttgttgcaggaattttctgtgccctccctcctctgggacagatctgcttcttgatactgcagggctccagccttccttccagccagctcatttctcagggaagccttgttttcctttttcagaaaatttaaatgtatatttaacgcacaatttaactccctttcctgttgataatttttttcttcttcatattttgttattaataatagcttacagaatgggatcagtatcaggatcgggaggtaaccaggtctccaagttttccctttcgtttttcttttctgcttttaatgagccttaattaatccagggagctaggctgcagtatctgtggctctccctgatgttttctttctgcctttctgtcttggaggggaacctgaggatttggaagtagagggctctactagtgcttcctttttgtccttttctcattgtccaaaagagtcttaagcgatctccaggaaatcccctgctcctgccaggaatctgcctgtgagtatttgagtgagttgctgctttttaagtaccagttgagaagctgaaggttggtgttgtggttgtgataaactcccaacatgaaaactgaggaccaccagcgttttcagctcacctttgactcacgctggcagctccaggaacactgaacaggagtccccactgaacctttgctgcgttccgaagcagcacagccatggttaggcactgccaggcagctcttggaaaccacagggagggaagttttggttccttctttctgtctttgtttttgagaggaatgagcttggaataaaagaacgctagtaatgactgatttgcaggttaggtgtaaacattaaatcctcataacaggctaatgagaggtgggagaaattatccccattttacagatgaaggaacagaggctcctagagactaaagaacttgctactcaatgaggtcaggattcacacctaggttgacctgaggatagctgctgcagtgctcacccttcctaccttcccaagaaacaatacgcagagaatttcttttctaaatattgtgtgcctagaaggtgctttgtgttatcgaaacagatatatatgtgtatatctggtctctttaaaattctctttaataaaaacaaaaagtgatgctagtgtaaaataaaagatatatatagaaaattgtgtgtcctcgttaatcttctttaggaaagatatatgcatatatgcagtatagttttgggtttttataaaaatgagatcatgctattagtatagtgaatagcctctatatagtctttcgtaacatttttactttttctcggtgtatggatatcaatttaggtcagttgctgcggagtttgaaacgagttaaaatttcagcagttcacaaaatggatgattcatagtttagtcgagccatcatctgttgatggacagtcatgtggtttcttgttttttctttctctgtgtttcactaatgaaacaggattacagtaaattgactcgtgtatgtgtatacatccatctttgctggtactatagaaaagtgtattgctggctgggcatggtggctcatgcctgtaatcccggcaatttgggaggctgaagtgggtggatcacctgaggtgaggagtttgagaccagcctgaccaacatggcaaaaccctgtctctactaaaaatacaaaaattagctgggcgtggtggcagtggaggctgaggcaggagaattgcttgaacccaggaggcggaggttgcagtgagcctacatcgtgccactgcactccagcctgaatgacagagcaaaactccattgcaaaaaaaaaaaaaaaaaaaaaaaaaaaaaaaaaaaggcattactgccttgttcctgatttaaataaaaaaatgtgttttaacaaggaatatgttaagttttggtaaatatagtttatcatatttaagttgtgtatactcattcatgttttaatttttatcggaagaggctgatgaattttatgaaatgcctttttggcatgatataattgtgagcttttgcttttatttggtggtgtaataaattacgttgattagatttcccaatattgaatcatctttgcattcctggaataagccctaatttgttatggtgtgataatctttggatatgttgctatttgatttgctaatatttttttaaaaattgtgactgtagcctacaaagccctacagataggggtctttagtttttttccttgtttgcattctatcaggtattgatattaggattatgttttttaaataatttaagaagaatttcaccctttcccagcatctagaagcatttacataatataggaaataacctgtttttttttttttttaagttagagtaaaattaactggaaaacttcataggcatcccctgtagtcccatcccagaacattttaaaacaaattttttagtttttcagaatatattatagttgttctgttcagcttttaagccttttctctggattttgatattttctacttgctgggaaagaatttatctacaatttgagtttatcgcacagttatttgtaatattgttatcatttctctggtaatcataaccctttctcattactaacacatatttttgctctttttttgcttttttcccccttaatcaagtttgttagaagtttatatattttattgtcttcaaaaaactaggtatattaattttatatttatcctgcttttaatttcatctcagtatttaatttttattcactttttccattcctttaagtttattaagttgaatgcctgtctcatttgctttttagtcttcttaaaataatggcatttaaggctatacattttctttgaaaattgcttttgttacgtatttttggttttagacagttgatctcctttttgttgttttctagatggtttgtaattaaaatatttatttgatctttgattctgacattacttagaagtatgtctgtccttgaatttttcttttgcttaccttttgatattgtttatatgatttatgaatgcagctctgaggtatctgagaggatttattaacgtttacttgcgtccaagtacatgattaagttttaattgctttgtggacattaaaaaattatgcccttggtaaaatgcaaaggttttattttctgtatttagtaaatcaaacttactgattgcattatagtcagatcttccaaattcatgtatgttttcagttgtcaaattgacagttaatgatgcaccttttataatttttttttttgagacagagtttcactctgtcgcccaggctgtgtagtgcagtggcgtgatcttggctcactgcagcctctgtctcctggattcaagtggttctcctgcctcagcctcctgagtagctgggattataggcacatgccactgcacctggctaattttcatatttttagtagagatgaggtctcactatattggccaggctggtctcaaactcctgacctcaaatgatctgcctgccttggcctcccaaagtgctgggattacaggtgtgagccaccacaccgggccccttttataatttttaaacttttcatatttccaagagaaatgcttagtgtatttatctgccgttttgcttgatgcatcaatatgtgtaatttttttatttttcagggattacatatttatcacatgtaatatccctctctgtccagtttaatgcttaatggccttgagttcttggtttgattttactattgccagctttgctttctttttacttgactttgcttggtatactcttgttcaattgtttgtttttaaatagagctggacttttaaaacccattgagacatttttgttctctaatagggacgttctgccttgtctttctttactgtgataatgcatacattttgctttattgctttcatcttattcaatggttgccatttattttactttctgttattctcaattcccatgttaattgaacaagtcctttgctaatttgaaaagtgtgttattttcaaagctaccggtgcctaacaatttgaaaatctgtatttttctcctgaaataggtaccagcattaaattactaattcttccaccagggtttgcatttccgcaatttctgccgttcccatgactttctctgtctcctggatgtgttctctgtcttttcactcatggattctagtagattcttattccttgctcttgggcgctcgcatttcttcttcttaatcctccagaatctgatactctagagcaacagatcttttctgttcaatttaaaattttaaagtgtttttttttttttaattcctgaaagtttttatactccaattgtgtctccacatatgctcttagactcctcttcccgtctagttctcctttcttggttcaattagttctgtttcagctggtgccacctgttgcagctgagcttggtcaccctccctcaggctcctgcgtcgtcctcagtgggtcatggtttttctttgcttgccgatggctgccctcagccgtcacacaagtcatgggttagtgtcactcaaggaatggcagaccagcagatggtaggtgataagccaggaaacagatactgtgccgctgagttgctctgttcccagtctcttccgacaacataaggcttgggaacagttccaccttccatggaagccccccttccctctggtttcacctgggacagcaggatgagcagggtgcagggccttcttccctgtggatggactctcagttacaatgaccatggagaactgtacccgctctctgttttggagatttgggagatcctgagggcctcagaaggccctcactctcatcccatgcactacctgtaagctcattagattactgtccttgttactttagagaggggactgtgagggaggcaggaccaagtatgtttattcaggccactgtcttccccataaagactatatttgtgtacatttttctttgctgtattgtgagaaggaggtagaaaaaagatgtgcatgtctgcatttggaaacagttctgagagtggtgctgcatcagcggggctggattgccctcaactataagaaagtgggatacttatataaaggaagcataatacagcatgtttctcttacaggaaggactgtttcttagagtcctcatcctctgtctccatcactcagtatagcaaatcatacattccatcaatgttaatgacatcaattgtatgcctgtaagtatgtacacacgcacaggggcagggggcacttcttcactccacagctggaaaacttgggacaaaatgcctagccagcttggcccaaatttgagggtattgccatctgtatctcagtgcaggtgtttctgtctgatgttcacagtctgtttatccagagtgccccagaaaggacagtagtgttaggttaaacctgtgtatgtctgttcttggttttaataacagtcctgtctttggaattatttagtgtgttctctcatttctcaggaagtcaggatgttagtgccgaagcacttctctgacttggtccgacattgaagtaccttcccctgcattacagaagaacggccccccagggggtctgtttgatgaacacatgtattattgcagtgagatactctagaaatagcttcatgtccttgcaaaattgccagcacaagtaaggacctggaaattgttgctatgcatgtatgtcagaagatttcttaaccaattctgtactgaataaaataaaatttattttcaagttttgtagggacctggggcaatatgtcagatagagttgaatattttcaaggcatttttagttcatggggcacatagttggcttaagatatctatgtgtatcaggactgaaaggtaaagtgcccgaacctgctaatgaaagaggtgtctgtgtggccatctgaggttcagccacaatgtgtcttgcagaattattttattttgctagtttttaatttctcaaacagttcagctgcctgtcccgtggtaccgtgagacttctaattcaagatgaccagtatttgcagacagagccactgcctttgctgccacattttgcttggttattgtgtgagaacaccatttttctctttttaaatgaattgtgtttctctttttaaattgagcatctgactgggcgcggtggctcacgcctgtaatcccagcactttgggaggccacggtgagtggatcacctgaggtcaggaatttgagaccatcctggccaacatggtgaaactcctgtctctacttaaaaaaaaaaaaaatgcaaaaactagctgggcatggtggtgcacatctgtaatcccagccacttgggaggctgagggcaggagaatggcttgaacctgggatgcggaggtcatagtgagccaagactgtgtcattgcactccagcctgagcaacagagagagactgcctcaaaaaaaaaaaaatccgtttacatagtgataaataaagtaattactatagtggtggcattctgcctaagtcatcttgaaaactgaatgcaaaatctttttaatagctccataatggtctcttgaagtgttacagatttttataacgatagctgtaatacaagtgcctttatttactgtgagacttgaacattttgaccatttacatgggtacttgtgtgtctccagctgagctgagtgcatgtcgctgcggcattgcaggcgtgtgtgcatgttggctcttgcaacggggcgtctgccaggggttgtctcgggcaggagaaggaggccagactggcaccacttgtagtgattggaatgtgtctagtccagctcttcagttccatgtaggaggttttaggatggagattgtgttttgggaactccaagtcactgtccaatttggagagtattatgtaagaaggcttatgttttctgattacccatccttcgatacagaccaaataataccacagtgataaaaatgggaaaggagctgtcgctcagctcttcttggccgtgttgtttgcttttcgatgtctaatttatgaaagcatttcaaagtgacatatatactgaacagcttcgtcttgccaaatgtaaaataaactggagatgagtttagcacagagctttgtagattgttgtcctcttggtagagtcggggcctaaacaccacctggcctctgtgccagtggacaggtgacctgcctgtcctactgctggtctctgcagctctctgtcttgggcaaccctggctctgagttccagagtgttctccagtaggagagtctgcaggggcactgtggagcacctgggtatgtgcacatctgttgttggctggcgttgtctctgatggcttggggtgtcacagagacatgacagtactgtcactgcatacctctcaagcttttgctgagtcctacatgagttgcaggggcagagagggagggagaaaacaatgcctagccacactgagaaaggggaaagtgctacagagtcctggaaggaagcgaggatggacatggacggggaagcattcataccaggcaggaaaagtgacttcatggaccagtcacagaggacagggccagggatcaaaccttccgtaatttgcctccacagtttgtctgagactggctacctggttgagtctgccagagccctgtgtgcaggtactaccactcactgtcacctccaggcaggaaaggccatgtgaatgcatgcatctttgcaggaacttgcccctttccactgaggtttgaggcagactccaaccacatttccatccagtggcttagtggtcttacccgtgagcttgaactgttgtccctgccaggacagtctttgcctctgtaagtatctccatattcctccatcctttcaggtcccattcagtccctaggtcctccatgatggaatattggttgatgcacttattccacaaacatttgttggccacctttcaagtgccagacaacccttctaggtatggaggggtacagtgatgagcaagccactgtttctggctgcagagggctcactgtttagtgggagaaacagacaaatcatacatcttaactacactgcccttgattgctctttacctgttatatcagtcgatcttgcctgcctagcatttgttccctgtttgggggcctgtatgatgttcgtttggatacctcagggtacattttcccatctttgtgatgatgtagctcacttggtctgaatgatatgtaatcctgcacatgtagagtgaccattatatttgcataaatagcattggaggaatatataagaaatgaataaaagttgttatatcatttgatttttcttttcttttcttttcttttttttttttttttgagatggagtctggctctgctgcccaggctggagtgcactggcacgcgcatagcccatcgcagcctcaaactcctgggctcaagtgatcgcctgcctcagacttcattttgatttgtgaacctcgtgattctattacttgttccacaaaaaattttaaatgaaaaagtatttcaaaaatacatatattccggccaggcatagtagctcatgcctctaatcccatcactttgggaggccaaggcagacagatcacctgaggtcaggagtttcagaccagcctggccaacatggtgaaaccccgtctctactgaaaatacaaaagttagctgggcgtggtggcacgtgcctgtaatcccagttactcgggagactgaggcaggagaattgcttgaacccgggaggtggaggttgcagtgaaccgagattgcatcattatgctccagcctgggcagtgagtgaaactctgtctccaaacaaaacaaaactaaaacaaaaacaaaaacaaaacaggctgggcacggtggctcatgtctgtaatcccagcactttaggaggccgaggcgggccgatcacaaggtcaagagatcaagaccatcctggccaacatggtgaaaccccatctctactaaaaatacaaaaattagctgggtgtggtggcaggtgcctgtagtcccagctactcaggaggctgacgcaggagaattgcttgaacctgggaggcggaagttgcagtgagctgaggtcgcaccactgcactccagcctggcgacagagctaggttccatctcaaaaaaaaaaaaaaaaaaattcctccacaacatatattccaatgtttagtttttctgttacagagatcacatgtactctaacttgtcaactaaatttaaaaggaaaagacaactttgagagaaaattaaaaccaatgcagtgtgtgtaaatgccattttgataagctcttatttcatgttgacatattctatggtgctcgtcttacataacctagttagggaaatgttttgttccagtctggctttgtttttcttcatgtgtttaggtccttccactttccttttgttaatttttggtgttgtacttcaggaaatgaattgagggttgcaaatgacctggagggccttagtttgtttgcttgtttgattttagcaacagtcaccgtggtacacctgacgtggctgggactcctgattttttttttttttctttttgagaacaaagaatgtgtccttgtcttggcatggactgggtagccttgttcacctccccacccatctctccttattggtgaggcattgtaaaccgtgttaacaggtagcatccacagaaccctggaaaggttgtgaagtccctttggaagcctaagggttttgatctcatccaggttgtaatcttaaattctggtacaaattcccttgttacaactgggttaagtggttttaacctcttttgtgccttcattttgaatgcttagactggaaagtcgttcagagactcctgaccgaataaagcctacttccaaatgagtgggttgtccaggtgtgcttgtagatgtcacatacttctaacaaggctctgcagctgcgatgtcaccttgcccagcgtgacctcattagcatgtatgtggctttcagtggccatgtactttgcttctagagctttctttcccattctgggttcttaggagggggctgtgctttgtgtgtggccaggcagaagtccatgttttagcttttcaattctcttgaagaaaacaaatgttgttgataagaacacttgtcatggcatccgatttgttcttgtgagggctgtattagcaataaatagacatttagtttgcatatttaacacctcatcttctttcagcccacacgtcttcactacaggattagcttttcattacttagtagagcttttaattacctgaagctttcgtgtctttactgggatataacttttctccttattaaccagaaaaagtcacagaaaatcttgtaatttataatggaatggagtaatattcacaaacaggctttggcaggattttttttgttattgtgttttttgtttttgtttttttgttacactagttttatcacaagacaagaaagaggggaacttttagaaataaaaattatgtgctaaaataattaaccttcctgagtaacacacacagaatgttggtatagtgtttgcaccagaggaattacatatggaagaatgctgggatcttttaccaaataagggaaagtagagttcattacaaatagaggcttctagcacagaaaagaggacattttataagtactgtgaagcattttcagagataattaaataatagaaaatattaaaccaatttaaacaatttgtagtttttttctaataaccagtaagttcttcgtcttcgaataattcttttatactgttctatttccagctccactgagtgcccctgtgttttcagagaaaacaggagtctgttttggacttcctctttggtatatatggtgggagatttgtttaaaaaatttttttatagaggtaaaattcatatgacataaaattgtccatttaaaggtgaacaactcagtgacatctagtatattcatactgttgtgcaattgccatctctatctagttccaaaatacatttgtcatgccgcaaggaaagcctgtaccccttaagcagttaatccccattcccctttccgctcagctcctggcaaccaccagtctgcattctgtttctatggattcacctattttgcatagtgcatataaatgcagttatataatatgtgaccttttgtgtctggcttctttcacttagcataatatttttaaggttcatccatgttgtaatgtatcagtacttcatccctttttatgggtgaataatagtccattgtatccagttgtatccagaagatttgcttttcattgcctaacttcagggcttcagacacctcaatctttgttctgagatggatgtaaacttaatgtatatctctctctctcacccaatgatcatgccaacaccttttttttttttttttttttttttgagacagtctcgctgtgttgcccaggctggggtgcagtcttggttcactgcaacctctgcctcccaggttcaagtgattcttgtgcctcagcctcccaagcagctggggccacaggtgtgagccaccacacctggctaatttttttttcttttctcttttttgtttttgtagagatggagtgttgccatgttggccaggctcgtctcgaactcctggcatcaagtgatctgcccgcttcagcctcccaaagtgctgggattacagacataagccaccttgcctggccatgccaacaataattatttagaagtatgttgagaatacatcccaataatagaagtgaaagctctttaaaaagaaaaatattcaaaacttaccagctgatcttatgtttcatttagaatggctgcattctttgcagtaccctagggttgtagaaattctcccccatgattgcacaacccactccttctcagccagtgtgcacctggagtcagctgtgtttggccttaaggtgtccatggtccagcagggagagggcagatgggtcagtgttgtcctgctagtgatgagtatcccatggtgggcatgctgatgccacgcaagggagagggtgtctggttctgtgcagtggcagtggtgcaaccccttaccaaggtaccgtggggacctgggttagggcaggaggaggaaggtgttctctacagactgcagggcttggaggcagcctgtcatggggaagggtgtggatgaagggtgagccgggaccccaggcaggtacggagcagttcaaggccgtcaagtgtgcttcattcttcagtcattagggtgtctctgaaaggtttttcattgaatcagaattcccctaattcacgaattctaaagcttaagtaaattcagtaataataaactgtcaattatccaagcgatgaatataaatccataaggtttttcaaatccccagaaatccctttcatctcccacctggttttgctgagcgcctgtctcttctgtctcttttctgattcccacctttcacttttcctccatttttcgcttaatggatttatactttaaagtaggtattctgaaaattccaattttatgaatggtgtgacggtgagaactttgattcattgaaagataaaaataatcattacattttatactgcaagggtcatccttaatattcttcgtatttttaatatagctgcatgatttgagtagttgagttggggattggataatgtatttattgattgattaactctctgggggtccatacatacccctctttatatccctgtggtccctttttagtccttttgtaaaaacttgataatgttaacctctgccaaagttgatgcggtagttgtgagtggtgggacgcaagcgtgttgatttattcttggagacagcagaaacagcaccaccttcaactgttttgtcatgatcatcttgtaaccataattctgtgctaagtcagaattaatgttattttgttaattcaggttattgtgaaaatctccacaggaggttatttaagcaagtcacaaattgatgattctgtttgtagaaaaactccagctcatccagccagccacattattccagggctgcatggtgtcagcgtagggaccaggctcggtgtagagaccaagggtgcctttccccttcctttccgcccgttaattgcctactcgcccagtggtaccttctgaacttttagaaatccagataggatttccacatggttcattagaattcatttatttttttccatctgtatttctttttgttgtactccctagatcattatttttagttactttttacatgcattggttaggtttttcatgtaatctctcagtaagcgtactgggggatgagtgacctcagtatttaaatttttcataggtgggatgaaatgtcttttctgagtgtgagtatttctgttccattcttcttttccaggcaggctctcattctgtgctgcagtttggattcagggagcactgacccttctgtcaggttgctcctgctatgaaggatggaagggcattttgatacatgaggcataactgtaattatccggtggggcttggtttgtgctgttttccacctcttcgtcatattttggaaaactgaggccaaaagcaaagttcattttcccctttaaaagcttctttaaaaaaatgatgaaagagctttatcaatgttttgaataacccagaaaatatttcttattgttgataatctgcagtttgcaagtgcagcgaatcttgtaggtagatttaccttgagttttttgaaacggtagaattaatatattaaaacatatggtttttagttaaaataggatgttaaaggaatagagcgcacgaacaaagaactttccacttgaacccatgttgtttcatctgacagtgggtatggtgtccctggcaggatagggcttccacctcctgctggtgccggtaggacagggaagaggtggggaacactgtgtctccatctcccaagcatcttacctcccaagtcagatccctggcattgtttgcatacttgcgtgtttgtgtgtggggtgatgttttcctgagaatgtggcaaaataatagaaggtcccagggttcctcagtctgcagaccatagctgagtggtgtgtgcctctagccatgaggtgaagcataggtgaaattcagatccataggaagacagacagactttgcaagttagtaagctaacttgctagaggaaacggtagactcctgtgctggctgccaactaaaaagcctttctccacagttctgttctcatgtacaccctcaggaccttggatgagcttgtgtgttcaggaaattgggcaccgagattttttttgtatctttgattttagttgatatgtagtccttccaaggaaagtattcgttggatgccctttctacactttggcattgtgcaagaggtatcaaattttaaagtaaaagtgcacaacctggccaggcgcggtggcttacgcctataatcccagtactttgggaggctgaggcgggtggatcatgctgtcaggagatcgagaccatcctggccaacgtggtgaaaccccatctttactaaaaatacaaaaactagctgggcgtggtggtgcgtgcctataatttcagctacttgggaggctgaggcaggagaatcactttaaccagagagttggaggttgcagggagccgagatcgcaccactgcactccagcctgggtgacaaagcgagactccatctcaaaaaaaaaaaaaaatgcccacaactgggcatggtggctcatgcctgtaatcccagcactttgggaggctgaggcgggcagatcacgaggtcaggagatcgagaccatcctggctaacacggtgaaaccccgtctctactaaaaatacaaaaaaaaaaaaaaaaaaaaagccgggcgcggtgccgggcgcctgtagtcccagctactcgggaggctgaggcaggagaatggcgtgagcccaggaggcggaggttgcagtgagcggagatcacaccactgcactccaacctgggtgacagagtgagattccgtctcaaaaaacaacaacaacaacaacaacaacaaaacctcacaaccctggtctcccagagcttccatattaataaatctagacaatgtgaaatgcaaatccacttaatatttgatgcaaaaaaaatttatttgacctgttattttaactctttgacataaaatctctaaatcaaaataatcagcaacagttttaagtgtataaatatgtatttctttcagtgcttgaacatttttagacaggaagattcttgatcttctttgtaagcaaatagcatcaaagagtaacatttctgtacctttgtggtatgtaccttgtggctaatttgtccatgaagggataggcattgtgttttgttgcttaagtcgcttaaggcctttaaagcatttccaaactcacctatttttgctctaaggggtataaggtgttaaaaaatgaatggaagttaactcattctcaccttgtctgctaacttccttttgttctttttctgtaagaactcataaagctgtatgcatcagctgctcccaggggccttctaaggcctcagtccaacaacagtgctacaggtgaggaaaggaaagaaggcactatgtcatcatgtcattcttttagacttggtaagaagtatattcaagcagatcagatgctctcagaatcacagcgtgttgtactgctagtaattaaaactgaagtccacgttgaataagaaataattttttattgattgctggcatttgtgagaaagggtttaattagaccaggatatggaggggacttatcgacagttccgttgtacattgttgacatggttattttctgtatctcattttgcctgggaatttgtcattctcttctattttcttatcagtagcactgcttttacacttattagccctagctgtttgtcttgcttatttaaacttgtacatggcacatgctcaaagatttttccaggcaaaatttctttaaagcaggatttgagattttccatccccttccgtctgctggattattccggtgagtgttaatctcccgcctttgtcttagcctctctgtggtcttcggttgcttccttgttctctgtagatctcctgagttggccattagctgtcaacagtcagcacttgctgcctctcaagtctcttcccctcctggctctgccctggttttgctctctgacggggatctaaattgggattctttccagtgtggaatcctgggtgtccaccatgtcactctgacttccagatgataatgagtgtgaccatgggctgaatgaatgtctctctgctgggattaaaagttagaggaaggcaaaaacagacattgcgtgttctcacgtatacgtgggagcaaaaaaagttgatctcttggaggtagagagtagagtgatggttaccagagactgggaaagggggcgatgaagaggggtagagaatgagtacaaacattcagttagatagagggaatacattctaatagggtgactatcgttaacagtaatttactgtatatttccaaatagctagaaggttagaaatgttcccaacacatagaaaggatacatgtttgaaatgatggatatcctaattattctgatcattatacattgcatacatgtttcaaaatatcatattaaccccataaatatgtacaaatatcacacatcaataaaaaataaaggggaagacataggtgtaggcatagatttttaagctgagaaccttttgacagggaagaccagggatggttttagggtgtggggaatctgtgtaagttggccgttagctgtcaacaggcaacaatcactgtctctcaggtccctcccgctcccggccgtgtcctggttctacttgccggcagggatctaagttggaattcctttccaacatggaatcctgagtgtccaccatgtcaaaattgtgtcaaaattcgtctgtatgcatttttcttggtagaagggtccccaaaagtcaccacattctcagagacttctgatccctaaaactttagatcaacagtcaataaaaaggtcccagttgtgtcttagtccccatggcagtacttttgaacatttaaaggtggagaattgctactgaggactttgttctgtggatgaaacttcgaatgaggattgttggtgagagttggattgttgttgtatgaggaagtgcaccttggaatctaatggggtcttcacggagggggagtcagttgtggcactgtttgtgtattccattcatcattcatccctccatccaagcacccacgtggagctcagaaagatgactaacacataccccctgctgctcctgtttttctaaggtgtgctgggaccatttacatttagttctttggagaacacaactacttaggatttttgttgttgttgttgttttcctgtacattgtcttcctatctcccttctggtacccattccaccctctctccccttcctcactgccgtttcataggggttctcagattcctgtgaataaagcaaaccgatgtgcagatatgtgtgcttacacatgtggacgtatttgaggaggtaagagggacctgcacaaggctttagtgagtaagcagagaagttatttatatatagtgagacccagtaaacggcgatgtcgcaggtgaggcagttgatctggtcagaatatgcctccagagacatcactggtgaggcctgcatgcatgttgaaaagagtgtatcttacatctaggcttgggtttccccctgcagctcacttatgaataacaacgtatgcaagagatttgaacattttcatgttcaaatgaaacatgaaaagggaaaaaaatttaaggttacggttaagtttggattgtttgcttattggtttggttattggcaattgctacaaagtccagggtgttctttatcagcagcatgcttatcaagttactgacgttcaagctgagtttccttccctccctccttccttcttctccactgacattttttttttttaaataggtagggaggcatttaatcttgtagcagcatgagagtagcttaaatgtccctcctctagcagtatgtttatagcagcgtaggtaaggaaagcccagcttgcacagctgagctctaaagtgcatacatcccttaagttctcatacacacactggccagtgagacccccaaactgcgaacagagaattctaattgaagtaaaagcatgaagtttttctttattgaccatgtagcaactgtggaatcatttgaaaatttctgaaaacatgaaacaggtgtttataaggagttttctgacttaacaaaattggtgaaataccaactttactaaaaactactaattcataattttttgattaataatttctagtctggaaaagaggaattttttgaaaatcactgatatttttgatatactgttgttttcaaattgagttctcatagtgtggtcggctctgttctatggaattaatattgaacaagctgttctgaacctaagaaaggtttgtaaaaaataaacatgaaggaagacttcattcaagaggtcacttaaaaattattattattattattattattattattattattattattattattgttattttaagaattaggtctctgttggccaggctggagcacagtggcacaatcatagctcactgaagcctcgaactcctgggctcaaacagtcctcctccctcagcctctctagcagctagaactgtatatgtacaccaccacgcccagctaatttttttttttaacttttttttacttttgaagaggtgagattataggcactagccactgtgcccagccaaaaggtcactttttttttttccttgttggggaggaatcaataacaggaacaccagtcatgatttggtgttttttccagggcagacaaataaagatgatattacgatgtttgttatcacagaatatgtttgcttttgataggggttgggtgctgaagggtaagtggttagaatcattctttttctaagggtacagtcattaatactccttgattcaaatcactatttaagttataaatacatggatttattttctaacctcaaaattatagcatcttaccacatatttgcatgcctctcttgagttaactactggtgatgattcttagctcatctgtggccaagtatagataagagaattagaaagttgtttccagcgtgtgaacttttatgattttcttccttggttactgtactcagttcttttttgttttgtttctatacaagatgagtagctggtggctcagatgacccccgtgctgcatgtacagtcccatccagagagtgttgggggctgtgtaaacctcgaggctcagagtggctgccattttcctaaaagagaagtatggctgctgttggcctcaatgttcagctttacaaaaattcccgtaattaatgaaggtcaaggcatctgcaaacattaatggggtcacaagggacaaatcagttccttgaggggaagttaaaatgctagattgcttaccgctccagacaaggcattctcaagaagtatgtgcagtttcagcacaaggattaacacggagcattacttgagccatggggtgccttgggggacatggatcagcaaccatttccttttgctcacagcgcccagattttgttctggggaccactcttatctgcactgcatagcagccacacattttgagtgaaattaaccccaactagcattcgagcgtcctcccctcccccaaaagatggactgtaccccacactgtaatcagcagggaggcatttcctggccacagttcaggttggtcccttagaacgctgctcagaactgtggtttggtggctctgggaagcagtgctctctctgagtgtgaataaggatccacatagctccagtaggtgtctgacgacatcttgtgatccggggggaagccagcctaaggacaaagccattgtggggtgagagacaggattggcacaatcactgacaaccgcagtagtagcccagaataaactgtgcctgaaacctaccctatttttgtattttttccagttttaaggaaataaatcccctttattgtatactcagtttgaatcaattatttttatctctttgggattggtttttggttaatctcagcaattcagaaatagctgaagaactatgctgtgggtttagacatcatgccgtgacaaaaagaagaggatcttagaagcgggggacattcactgaagctttatgagcctttcctgaatcccttcaaatcagatcaagttctctctctcctgtgcttagaaatgctgcctgttaagtcacgttggctacagcacccatctcagatcccttgtgattcagttgtaaagtagattcttctggtctgaattagaggccaaaacacaagacagatcaaaaatggggaacatattgcaaatttccccacaaaagactgaaggatgtgtttaccattgattgcacagggactgcagtgtctatgcttttaggcatggaaaatgcagggtttgactatcgagtttagattttaaagttgaggattgtttctttaagaagaaatatagaatattattcagtcctaaaaaggaaggacattctgacacatgcaacagcgtgaatgaaccttgaggacattatgccaggtgaaatcagccagtcacaaaaggacaaatactctatgtgatttcatttagatgaggttccctggagtagtcgcattcagagacagaaaacagaatgatggctgcggtggtgggggggtggggggtggtttggggaagggagtggagtgatggtttcacttttgcaagatggaaaaagttctggaggtggctggcggtgatgttgtacaacagtgtgaacttacttaacattgctgcactctatacttaaaaatggttaaaacggtacattttgttatggatattttcccacaattaaatttaaaaggaagatgagtagtactcgactcattattggatattacatcagggaactggaggtagggtctcacttactagttacgtagctcaggaacctggaaccagactccttctccagctgggcagtcccaggtttgagtcctggctccactggaggttgtctgacttggaggttaataataacctgccttagtcccagagtccttagagggaaaataggttataatacctgagtccatgtgtatcaagccattgctggttccaggcccctggagcactcagaaatggatgacccccagctgggtcaggccaagtcctccctgctgtagcaagcgggaccattgcctcgttccccccacctccacatggaaggtgccttttgtgtcctgccccatctctgttttaacagtcacaagactgtaggcagatctaaacttgtttgcacattattatcacctggggagctttgacgattccaaagccaggctgccacccccacctctagaccaactgaatcaccatttccaggggtgggactgggcatccgtgttttcgaggcttctgggtgagtaccttgtgcaaacaagttcagggaccgttgccctagacactgttcttcccctcatgtctcaacctgggcctcctaccactgccaccaccacagctatgccacctgggatgtgtcccaagcccccacttgtcggggaagcagctggggaggggtctttggccacctctgcagctataaggatcagagcaacacctggcttctgtgcctgtggcccctgctggtgctgggtccctggtccgcactgaaggatccaggcagagtacagtgggtctcccaggtcagaatcccctgggttgcttgttaaagctcacagggctgggccccaccccagggtttccgattcagcaggtctcgggctggttggatgatgagaatttgcatttctgtcaagttcccatgtgatcctttttggggtctgggaccacactttgagaaccactggtctattaaacaaatctttgcaaattagggaggtgtgttgtgggaggaagagactgatagttgaaagaatatttgcctaaatacagtgcctagtatttgccaagtacgcagccttctttctggctttaatcatacagactttctcaatcacatgtaattgcacatcctttaagcagcttttgactgactttggttttctcttttgtggtgattttccttaaactcccgaagggagggtggaaggggcaagagaaatttttatttatttattttaatttaattattttttattatttatttttttattttttttttgagatggagtcttactctgtcgcccaggctggagtgcagtggtgtgatctcaggtcactgcaacctccgcctcccgggttccagcaattctcctgcctcggccttctgagtaacagggtctatgggcatgtgccaccatgccgggctaattttttgtattggtagtggagatggggttttgccatgttggccagactggtcttgaactcctgacctcagatgatccacgcgccttggcctcccaaagtgctgggattacaggtgtgagccactgcgcccagccagattttatttctttaaaaaagaaacttactagttatcaggacacttgtgttcttggtacttgattttgtcagcattatttttaagagcctcttccctccttccccctacctccctgttgagcccaggctctgaaataacataggtgcatgtgaagttcccctacctgccattaccagacattggtgctgggcggccctcacctccacctcctctcacctgaggccacagcggtgtgcaaggatgtggtctgtcttgagtgtgttttcaaagcagctgtttggtctgtgccttggatgtttttccacagataagcccaaaagagaaccacatcttaaaacgcccgtgaccttgaatggtctttccggaggggcggctggatttgtgctctcatcgtctcaggtatgtgtcaagccactgttgtttcagagctggacacaggtgcttaggaaaattcctcactgaagggttttcaggatttacaagttcttgctgtttttgtgaccttgtgtggtttctggtttcacagaaggctttgtttcttggttcttgttgctgctttcagccttggcctgtaatcactgggcgccagggagggctgcggtctgtttcccggggtgtgctcagataccgtgtcagttcacatgtgttgctgcagcggcagggggccaggcaggaggggcgggtgtcctgaagcacgctcaatttgctgatcagggccttcacttggattttgcacttgccgcagtggagacattcctcgtagctactcagtgtggtttgttttaagtgggccatccgttaattcatgtgacctggaacttggttaatgtacttgccaaggttaaagttgagacgctgtttgttaaacctttcaaagagggaagaaggttgccttgaattcagttccagggtttgggagtctgagagggaggtggtgaggggcccggggaggccctgagaaacaaaatgctggttaaggacacagtctgctcaccgacctcggaagtctctagacgtctaaagaagtccaagcaaggaatgatgaccgaagaggaacctcaagggtgcaggcggctctgggatctcagcacatctcagtgatggaatgagctgccggggaatgacccctgtgggggctgtccaaagtcagagcagacacaaacgtagctctccaggccccataccttggtgggcaagagggcagcaagtgcatcctcacagttgatggggagagcagcatttcagcctgcagaaaagagaaccacacagatgtaagatgaggtctgcactcacttgcctggtcatgcagagacggagctgggagcagctgcatgacttttcagagaagtggcacacgtttactgtaagggtcccaaatgtagaccactgcagatggtaaggtctagatggagggaccaatagtagggaagtaggggagaagaaagtaaaaccttacagtataaagacccatagatgctcttttgtttttgatgtgtgtacgggggttagatatttattgagcacctactgcatgacagagtgttcagcaatgacaatgcagagcttaataagaacaggttctagactaatcttttagggggtgaggatagaacagaaataggtaattatgtcctgagaacatgagagagtgttggtggacagaacggcgatgtatccccaagggcaactgaagccttcacagaagatgcaaagcctgtacgtggtcctcggagtcatgccacatggtgactggttatcttagtcgtaggaaaactgagaagctttgaggcatgttctatctgtctttgtgggcatcatcttcattatttgaacaattcagagtgcttgatgccttttgcttcgttctcacaatccttgacactaagctgtgggcttgggttatagtcactcattctgttattcatgtcattttgcctatccttccacttcacagatgagaagactgagacccagagagggtcatggttttcattagccaaatggtgcagaaacccagtggtcacagtggctctctagctctttgtcacccacagggcccttgataagagtacggtctttctccaggggagcagggttgaggagtgggggcagccctggcctgggtggccatatcctgatttcccctcccttggcccatagctctctatcttgggtgaggtgagaaagtaaggctgctccttgactgtggtcccttttgtgtctgtcctgcactgggccaccttcccaggggccttgtgtcagcctggtagtggtgctagtggccttgaagtgagagtgggtggatcacacatggcagatctctggcagtgaccttttctgtggatttccggtgactgatgatagcctctttggaagtcagcatatgcatagctctctgtcttttgaaaacaatggaaaaacccaccaccagccccaaaaccagctgtctttcttcttatgaatagatatccatgaaaagcagaagagtagtttcttgtaagtactctgggagtgcataatacattttaaataagattaaaaattatgttttattcttactagcatcactgtcagataattgagcgtgagagcattcagtgctgtgtgcttggtacgaagtagtaacatcaattcagtgttcagtacatccactttgttccagaacaatgtattcaaggtcggtgtattttggctgtgccacagagttctggaaattcccaagagaataagttttcacctgttatataatccagcacaagtgactgtgtagcagcaacctcatgtttcatgatgactttaaaatgcaattgattctaaaatttagcttttaaaaatttcgacttcagattttctctgaaggtttaaggtaggcttctcctttattaattttttcaagaaatatttaagaacactgctctgtgctatgtaccattctaagcactttacagatactaattcatttaatcctcagcctggttaggtaagtactgctattcccaccgtacagatgaggaaacagcctcagaggagttaaaacaagttgctcaggttacaccgtcagcggtttggactacttcagtttcagataatcactgtgaaattttactgttttgagctacacgtttcaaaatcttttctgatgcggaactatcattaaatcatataatccgcttctctggagtcagaggttgacaacacattagcacttgactcgagcctctccctggaggaggacattccgtctgcggggagccgagtccgaggctggagcaactctggaaccacagccctccagtagagggcacacgagagcaggctatctgtggagatatcctgttggcacaggggtgaagatgacagaggcgaacccaagcaaagagagttaattagcagagtttgccctccaggctcggagggcaagtcagcctggggacctggagttagttcccttttcagctgtgaccattgaagacattcatcaagttctctggctccgggatgtcagctgtggtagtgacttgcatgggaggttatccgacatacctcacacactttaactccacctcttcagagtttgtggccaagaatggagccaggtggctattttttttttttaaatttatgtaataacaaacattcgcatttattgaaaacttaaagtataataaaaaaataaataaaataaaaaaagaaaaaagaaaacttattcctgtgtcaggcacttttctaagtgctttgcagtgtattgtctcatttaatagttgtttaaattaacagagtaggccgggtgtggtggctcacatctgtaatcccagtactttgggaggctgaggcgggtggatcacctgaggttgagagttcaagaccagcctgacaaacatggagaaacctcatctctactaaaaatacaaaattagccacagtggtggcgcatgcctgtaatcccagctactcaggaggctgaggcaggagaatcgcttgaacccgggaggtggaggttgtggagagccaagattgcatcattgcactccagcttgggcaaaaagaatgaaactctgtctcaaaaaaaaaaaaaaaaaaaaaaaagagagtaaataaaattgtaaggtgaatatgttatctacttgatggaattttttaaactaccttgaaaagttttatagtttcctatttacagatgaaattaacatactaattataaatcatgcctcactattcactttaggcagtctatctccttaaggatctccttacggtttagatagataagtgaattgcttaatgtttttggaagtaataaaactgcatttctttttaattaaacaatccagataacaagaagtaattctaataggaaacttgtaggatgtatttacagaaaatctacacaatcttactgaacaatgtagaaaagaagatttaccagcctgggcaacatggcaagctttgtctcttaaaaaacaaaacaaaacaaaatttagccgggagtcgtggcatacaattgtcatgtccacttctcaggaggctgaggtgggaggactacttgagcccaggaggtcaagactacagtgagccacatttgtgccgctgtactccagcctggatgacagagcgagaccctgtttcaaaataaagaaaaagagatttaaatgaagcgaaatgccattttctctaggtgagaaactggaatattatcaatgtcacttcttcccaaattgatttataatttaaaaacaatttcagtacttctgcagcttgtttggagcttgataaaatgattgtagagtttgtcttgaagctttaatagtgaggcaggtttaaaattgggggcaaaaaagaaatgggttttagggtgtagaagggacttgcctgatcacttttgctagaaataaatgtccctccaaattaaattactaatgtcgcacatcagatcgtatttaaatccattagaagattttactgttccattagagctacccatagctggtgaagactctgcttatagtggaacctagtttctcagttttccatttatatttatttacctgagctttttgtaaagtagtaagtacttgactgaatttctgctatttatcaaatgctttttgaatagaaataatgagttaataacatttagccttttttggtaaatagtataaacaagatagggcaaatatgtaaactacttagaactttatctaccttgcatattttgtacctcttatttgcatatgcatgtcacatgctccttatgtaccatgtgctattactgtgccggggtactggggctatattgagtctatttcctgtctttgtagacttgatggataatttggacagcattgtgatattccaggtttaagagtcttaaggttcaagactacattaaatgttaatgtagtccaacatttcttgaactctgaaatcctctgagcatcttttcatgcactggcctaaaatgttttcatagcccagcaaaaggctgattacttatttccctcctattgattttttttgagatggggtcttgctgtgttgccctgtctgcttgtgaactcctgactccggtgatcctcctgccttggtctcctgtttatgttttaaatagcatttctcaaacctatttgagcaaataactttcctgttaatatgtagtattccttgaaagaattgaatttgtgagtccctaatctagacacttttaaagaagaaacaaaactcagtaacacatttggataaaaacctgaatatgtccattttgggatgaaaggaagcagctttgtttaccatgttgaattaagtggaaaacatcttattttaatcatgattgatagaaatctaaatttgtaaattctgatttttatgttttttttacaatgaaaatacattttaaatgtcaccatccccttccccatgaagtcttcattacaactaattttgaaaatactctctcatttatttatattatatatgcatatgttctactgtataattttaaatacttaaatggggttatctttttgcattgttctgtatcttttttcagcttaataatttaccttgcttataattattgtcagtgcttgcggacctgctctttatgcatttttaaccattgcataaagctggaatgatggacatgatttctttaatcactccaaattagtcatttagttgtttccagttttttagtattacaaataactctgcaataaacatgtcttgggtatgcattcttttagtttaaaatagtcttgttccttcagaaagttgctcaataatagacttagaaattcttttgtgctaattactgtaattgctcattttaagatctccttttattgttttcatagtatataatcctaaactgttacaactgaaatagtccttgagctaagaaagcaatgtggcttaaagataggatttctaaatagagacttaaaaattaacctttttggagctgtgacttcctgatgaagtggcagcacacaggctgaatatgttctacatctggatggcccaacatcatgatgctgtgatttgcgagaagctctctgcctgcctaggctgctggaggatggcaagttaatttatttgttgttgggagacctccccctgcccccattaaaaaaattattttgaaatacttgtagattcacatgcagtttcaagaaataataaagagtaattccatgcaccattttcctccaatagtaacattttgtgaaactagtacagtatcacagctaggatattgacgttaatatagtaaggatatatgtcatcaccacaaaggtacacctacttcccttctatctctcctctctccttcatgcctggttacaaactaacctgttctctctatataaaattttatcatttaataatgttctgtaaatagactcatagtatgtaaccttttggaactgaagtttttccatcagcataattccttatagattcattcaggttgctgtgtttatcaatagtttgtttctttttattgctgaatggtattctgtggtgtaaatgtactgcattccatgagcatggcatgtccctccatttatttagtttttctttgatttacttcattagcattttgtagtttttgtagtcctgtgtatgttttggtagagttacaccctaagtatttaatttctttgctcattgccagtatatagagatacaacttattgaactcactttttagtttatgctagtttattactaattatcaatacatgctcaagatatgtcaactccttttatttttattaggtgtcacttgctacattttgtggagaataccgatgctgttgctagaaagtgctgctgtcacaaagtgggtttatagatagtaccacgctatccttcttcctaggctagattagaagttatttatgtgctatatgcacatagagtttttgattggtctattgcaaatactatggcatctgaaattttttttttttttttttttttttttttgagatggagtctccctctgttgcccaggctagagtgcaatggcgcagtctcagctcactgcagcctctgcctcccgggttcaagcgattctcctgcctcagcctcccaagtagctgggattgcaggcacccgcaaccacacccgggtaatttttgtatttgtagtggagacagagtttcaccgtgttgaccaggctggtttcaaagtgctgggattacaggcgtgagccaccgtgcccggcccctgaatcctatttttaagtataaaaagtcttttttcagctctggattatggtgctgcaagctgatattcttctcatggcagtaaacagagaagtcctaggggtaatcttacccctctggggagtccaggatatctgagcatctcccttttctttttactgctagaaagaatttctgctagtagaatttttattttggccaactctgaccccttaggttgatgtcagaatgaggtgtaccaacctaggtggtcagagttggctcaaaatacgacattttcctgctgagcaatttagtctaggttaagtcatacttgaccatatgccctagtttagcgtccagtttgtgaacattctttacctgagttattgtaattctaatctcttatgtaaaactgcaggtagtcagccctttgtctccttcagttctacatctgcggattccttcaactacagattaagaatatttggggggaaaaacagtaaaaaaaaattacaatacaacaataaagacaacaaatttaaaaactagtataacaactttttatacagcatttgtattgggtattgtaagctagagatggctgaaagtctatgagacgatgtgcatacgttatatgcaagcgctgccattttattgcagagacttgagcatccaaggattttgtatccgtgggagtcctggaaccaatcccccttggatactgagggatgactgtatttacaacatgtctagattttcgacaacttgaattaaaccagaaagaatatgaacacacagaagttcatgtgtatatatatatgtgtatgtgtttagaagggagcaagctgttaaacatgggaaatagttgctagtagtttgtaattttatgattacaattttaaaattcaattttgcaactggaatttgacttgattggttagtgccttacagtaattaacctccaaatcatcagaatgtcatcttgttatttaggtaattgaatctacttttcttgtatacagaatgctttttggaaacaatacactgtatatctagtttgtaccaagaactaattgtacacagtcagatacttgcagttcttttggacttgagtttctttatccttctatcagatgtcacaattccctcttccctttgtagcatatgaaagtagttgtgtgtgcactgtatttgagaatgtcaagtaatagaatctctagaaaacattcatgatttcagtcccaggtaatccagagttaaaaataatgttcataaggaagggtagcaaaatttagattttaatacttataggaggtgtgttaattggccccagggccgcaggctttagcgttcagaggactttagccccaaaggttttgtggaacttttccagagtcctcaccagtacattgggaataaatggaatgcctttggaagtactttgaagattgaattcgatagtgttggtaaagcagtctagcctgctgtgattgtgctattgatgcaaatattctctagcctgtattatttttccttggagctcaggaagtgatccccacccacctcaagcagtaaaggaaagagaggcaggagggtctgaccatgtgaggtgccccaataaagcatctgtattgtaaatcaggaatgtaggtattgggtttccttaaaacaaagcacacctacgtgaccactagctggagcacaatgtgggctcggtctgctgaaagagtcagttggttgcggctgtctaatccaattatggatggtcccagcgctcagcctttcagctgctgcccctcccctgcagactctgcctctctcaccctcccttttagggcttggtctgtggctaccccagaaatcacgtgcactcctaggcttcagcgagtacagccttgttaatctcagacatggaaagcaagttgcctaggtctacagatgagtattcagtttccccaccagttgacctcagtgcaggttttgttggttccagtcatttggggtcagcacctgtttgaagccaggacacttagaacaaggtggaggaaaacctgagggtacatacagtgtggtttccttggctcatctaatgcagagtcagaatgattagccacattgcaaattgtctttactcagtggtttaattgttaaccagggagttaatttttttttttttattaaacaaagaagaaaacacctctagatttttctgggacagatggccccattgaaagaggccatgtgctgcagcgaatggccaggcctcgggtgtggcaagtgccttccagctcagtgcttgctttgtgctcctttgcctatttgaagacgtggatgaatcaaaatctataagcctatttcagtcaagtattctaaggaacctggaaacacaggggatttctctgttgcctctaatacagtgaaaaaccactgtctttttttgttgttgttgttgcattgggggaagaaagtccaggtttgcatgtacattttcactcataggatttttttttagaatagtttggggaggacattgtgctctggccaataactgggccagtgtctggtcacaagatgatcaggcaggtgcctgcatgactgtaggacagagaactgggcagctagagagcctgtgtggaacgtgaagcctttccccactttgttgccgtcctaaccttttctcaagtcatggagaattgatccttagacattccttacctctctcacccacttgaggattgctcagagcctgggtttcggattgaaatagcactatttctggttgatgacgacattctgtgagccagcaatgtagtttaaatatccacaagagcgccctggttccatcagcgccccttcgtaattggtcatgagacttggacctccttcggggctgggactcgggcaagggagttgagtagagcttctctttctgggctcctgggaaggattcatggcataaaagtgggacttcagcattctctgggcacacctgtctctgtttttgtcctctcctgaatctttctggcctgcagagcagaataaagtcactctgtgccaacctgacttttgttcatgactatattaggggcatggatagaaagtgcccccatagcactctcagataaaacaccttcaaacaaacccagaaacccatgctcacaaaaccacccaccttaaattatgaaactttcaggctgactaaatcctgaaggcgttggagcgtgagcaaagggaaaatggtgacacagagctttgcccttcctaatccaaatgaaaagctctgtaaccctccccccacctttgctatcaagaaatgttggacctttgggaagcagatgtagagtattgatccttaaaacagagacctctcaccctaggtctcttaaaacagagaccttaaaacagagtattgatccttaaaacagagacctctcaccctaggtctcttaaaacagagacctctcaccactttctaactgaagtgggttccacattggaagtactttgcagaaacttctattaccgcaattacttttgcaccaacaaatagtatcctcaactcagaaggaaagaattggaacactcagctggaggtgtctggtagggacatgtgtctgctttttgaatcagtcgtatatgtttttgttcctgtgcctggaggccctttgtggtgtgagaacattgaatttggagagggaaagggagacaaaagagaaatgggggtgatgcttaagggaaagtagggtttttagtttgttcaccacgcttgatggcagatttgcctctggatcctcaggccacgttcctatggtgggtagggatctctctctctctctctctctctgtgtgtgtgtgtgtgtgtgtgtgtgtgtgtgtgtaaatagtgatttctctaagttaataaagaatgtggggtgacctcctacacatgcccgtatgctattgtgtaggaacaaatgcatggtaggaatgggtagactctaatctgaaagcatcaagttgtatgcatcttctgcaattaggaatctgctcaccagcacgagtgctgtggtttctgtagttctgggattcagaggagcattttaaagatgtaggatgttggaggaggaggtgcagggatctccccttgggtaaagagtgggagacagtctctgagtcataatctgggaccagtggaaggtcaaagggaagaactgtcctgttgtctgctaagtcacaggcttccttcctgttctctgagccctgtcacttacccaaggtgcagcaacaattagtgtctgtttacacataacagacatctctttcataaaataatttttaaggcatttgtttggtagaagcttccctgtttgggggagtcttttccctgaatgcatgtaaataacttcacagtttgcgcaagtttgcaaacggtctatactgctcagccttgattgggctacccaaggatgcgcccgccctgctgaggtctgacagctctgggaggccagtgaggcctgtcctaatccctgttctggccggtgattcagctccaggtggaggctgtgcagaaacagccccggtcatctttgtgtgaaatacatttgtcgtcttcattttcttttttcttctgctggtatcttcatggttttcagcaaaactgtgtacattacatttttttctttaccatttctccgtagttatttctagcatttttttttcagctgatgaaagcaaatgaagaatttgtatgctccatagtcagtcaaacattgatttctctgacttttaacttagaaagtcattttgcagtggcttgcgtgtgtgtatttagactgtgcttctacaaaaaagcacacgtaggcttatggctcagtttacttgttccagctcactttcctgttcatttaccttcttgtaaaatggaaagacaaacataccttaaacttaactcagatcgtgattgccaactttgttctctgtgtgtaagtagttatattattcctaggttatggcatcttgatttatctttgaaagaagaaaaccctcactgagttgacagggacacattgttctaggcttctacaattgtgctgatgacgctttttcccattggaatgacagggatgataaggtcggctggctagcctttttttaaaatgtagaaaaccacaactttaatttatagcatcatcattttccttatgtatgtagtatgtttcaaaaataatccaatgtcagattcttgcttctgtgatcaaggtcttgtttttgccctttctttgctcaccacttccctgcccctgacgccgagtcctcgccttagaggaggtggtcagcttatattgcaacattgaaaatgttataccttacaaagaaggtgatatgccatttcttaattataatgatgtgcaacagtgacttctgatgtagacctttaacattgggccacgcagctttttctttggaggaggggcatttcaaattggatgatgctcttatagtttaataaagaaacaagcaaacaaaataggctatacagggcatgtgttcttaaactctgtgacagtggaggtgaacccaggcccctttcatggccttgggagggtcctcagctttgggggcgagttatctgggtggaaaagcaccatgggaggaagaagtcagagaggcgggttgctggagctcagagaataaaagcaagtctctgccctgaaaatggccctgatttgcttcagatgtactctgtctgccaacatttagtgtctgtgacttagccaaaggaaatgtacattaactgttcagtttctatgtagtttgtgctctaggattttgcctccggaggatttctgtgaaggaagctctgttcaagtggctctgttccacttgggtttggaaagaggccgggacaggtgatttcgaaggaaggatgaggacaatggaggagatgggcttggtcattgcagtgtgtgaggtggcccagcttatctggcattttggggtactatatgtgccatatgaggtgggtatgggtgtttgaagggaaagggggtggcctgggcaacttgtgtccttgcctagaaagatcatcactctttttatttaaaagaaacatgtgaaagagccatcagggatagttttgtcctccctcttcttacaagtgatcattcccttggtagggcagtgccagaccctgcttgtgagcacagaaaacgccataagctcctcatgaaagcatgtctggggaagcttatctcaaatgcagtttgcacttgcaaaggtcctgtggtatagcgggggagcaggggagatggagtctgggagcggtgaaggctgggtcactagctggctttgtagcctctgggcgtgttgtttttatcctcagaggggccactgcacctgctccatggtctcttcccacagcagacccttctgtctctgtgcctcgaggggctatgtggaaagcagagaaagactcaaccagagtcttcccttaaggaaatcggaaggaaaacaaaattaacggcattagaactgagtatgtattaaaacttctactgtcttacaaaatttagttttctttcttatttttctttccatgttgactcagtaggtaaatggactaaacacacattcatttagggcaggaagaacttcatcatttgattacctttagttcatttaccttataatgcctaaaacaaagcagaaagtgacgttggttaatcaaaaagatcactttcttttttgtgttcttttgtgctattgtgagatgcctcttctccagcaagctgtagttgttcacaaagtaaagctgttcctaagccttcattagattgaagcttgtcccagactttctttaaagaagtttgcatagcttagttcatgctcagatgattcagtgatgatgatgggttgttggttagaaattacttaaaaatgcctaatacattattgactgataaatgttaagacatattctttaagggtctaaatcctattcttgtggagctgcaaagatcttgggggtgtggttgcccttgtctgttgcatcatctttcaaatgcaacagctgtaatgatattctgtatcttgaaaaacttaaaaaagcaacaactaacttatttgtatcttttcctctaatatttagtttttacttcacttgtaacttattacatgtattaaggagtttatttttttatgacattttactcataaaaggatgaaaccaagattggtgatctgttcacatagattaaaatcctgtttgtgaccacttaggtgtgtaatgtgtgacttgtggactgtgtcagaggaagattttccaaccaaaagtacccattggtatcacagatgaaaagtccttataccatctgaaaaaaagtagaaggtggggagaagcttgaaaacctaaggaggccattaggaaaggctgtatattttctgattccgtttaaaattttaagttggtgaaaatactatgtgatcgaaggatgaacatattttagtaaatagagttatagtgctacaatgagataaatttcacaggtaaatgtgacgtagctaatgcataatcattctttgtgttgcatggcaattctgtacaaatagaaggtagcatgtttaacgttcctgttatttcacataaatacagactgagagtttcagtggtctggtttgaaagggaagaaatagaagaaggaaggagagaagttggcagaggagcaatctgctctaatatcctccagtacacaatctagctataggtcctcacctggcagggtttgaggatcagaatggtggctcaggtttagacaattctccctgtttgtggggcccagcagctagttaagagaaaaatcttttttccttccctattaccctataaggtccccaaattcattgtatgtagaatacttgagtcagaataactttcctaacacttaggtttcaggtttgttaggtatgcctgacagctctcttatcaactcccatttatttgctaatctaaatgaaagtttgatggtagagtattgtaaatgtagggaaggtgaagtgttcaccttcagatggtagctatttatctcagcaagaagagcagatgactaacacccaaatacataaccattattatatgacttagcatttataaggcatttctatgcatcctgagagactagagcactctcaaatgaggtttcagagtaagattcatctttgcaaatgaagacaaattagcaaaatcttcctatttttaaagtgtgccttttgatttgatacctatttatttgtttggaaagaagcttttaaaatcaaaaccatgaatctgtggttatcttcaaaggataaattatgataggtagttgttacccaggttaccattttaagatgattatggctggcccaaattaggggatcttttcatatatgtattatatattttaacttcagtcttttaaaaatgaatattcctaggtggcatgggagggtgggaaggtcaaaagcccaaacttctcttacttattggctgcttccttgaacttagcgtttttcttttggaaaagtgagcttttgtttttggatattttgtactgatactctgtgcctacacagattttgttttggttcaataagagttgatattttgccaggggttgcctcccatgagattccaaatacagatgtaagtttaacaggcttctgaactggatgtttctatgcgctgaaactctgtaaacgcgtgtagctttgtctaccattgtatattgctgtattgatttgttgggttgttttttttcttcctcctgaaaagctctggtctgtcctctgctgatacaaagactggtccattccccagggtcactgcaagagaacctccagggcctggccactgttagatattactaatctgtgaagttgctccaaattctcttgccccgatcataaagttccattgagttcaattttatgtgaaggttctttgtcaaaaggaataaatgtttattcaacagatccagttgttgtcagcattgacagatgtgaaaattagcaaatagcaagaagtctcccctttagaaaaggaaaacaagtacttaaaaaaaatcttgtgttgtcaataaacaagtccattttaaaagcatctttgaaggtgtgtaatgaaaatggaggccttaggttgtatcagggtttatgaggagccagcttatctgtaatcagatgttcctgttactgttatcactgtagtatagggcttagttctgccctttaagtcacagactcaagttactcctgattttaccagcagtcagaatacatttttctttaaaaggaaaagagacgatatcctagtgcttctctatactaaaacaggaagagaagcttccttgttgaagtgacagtttagatgttgttattttgacagaaatattagtaaatatgtcacattatcccttgctaaatatttatagcatagaacgtatactctgatgcataatattttatgaaagaaatatcttttgcctcaaatccctttcactgttttgacatgaatctataatttatacccagaggtctgcaggaaaaagactttattaagacccttttatttcagccaagataaaactccatcctaagagggaacaccctggaatctttgagacccttaaaggtggggtattctgaaatacctgtgttcgttcctttgctagaatttagatagcttcacttttgcaaaaaggcacaaaatgagggcaatttttgatggaaaattttagtttttgagatgaagcagggggcacagtggcgaagcgccctatcttagcacttaggtagcagccgtaacaagtgtcctgggtattcctccctagaaaggaaatgttggtcacaaatggcagtgtcctctgcattcagttcagctatgtgactgaaagacactgttcttcagcagctgtgagtttacaagatgtcgcacattgagtatttttctctagcttatttagaaacgccagtctagacttccgcagttttggattcgtggccatagttttggcctttattagatggccctcaaaggtacttttcaggtggacattgatttcatgccagctgtcagagatgattttccctagaaatggctgggtatatggagacattctgtattagaatggaggtatacacccatctcttctgtattagagagcaggtgttgccccccgtggtgctcagattgcttagtgtgagaaggaaaagaccagtgataagaggaggaaaactgcgccttccatgtagctcagttaacagcatcatgattctccaggatggccccatttctgtttttatttacaaaatggacttgagaattaattagtaagcaaactgtctccattaggtaagtggcattctgatttgtctgtgtaaagttccatttcccaagtaatgtgttccaaagcatttttatgtacaactactggaaactgctgtacaaatgtttgctgctatttggttgtaacaaaatcagtaatgagtttcaaaatggaataatttcagagcccttcatctacagtagtttgggaaacacttgaaataccaagtgatctgaattcactacaagctctccaactggaaaatgtgcctggtgtcgtcttcaagcaagaatcccccgccccttaaccactgctgctgtggacttgagtcttcaaccttgttttgtagactttagcatttgtattgtgtcatccttgacacctccccaaccccagccttcccagctttgattgcttaccttagcaatgctctcagcttggaccagaaggcacggatgtttccctgaccttaacctcactgtgtatcagctcaaggaagaagccagatttgctgatgttgtaagcactaaattatgttcataacatttaaccctcacatccataagcaaactaagtgggaaaataaagattgactattgtagcagtcatagattgtttaggaagcagcaaaaaggcaaatttttctttaaagttcaaaatggggcgaaagagggtaggaaaggaaaagtttattaagaaaattgtatactacattaatttgactttgccgtctagacttaaattaaattcatgtatttttttggtcttaacacattgacatgtatcagtaagttaaaaacttaaaaatacacaaatgattagattagcattattatgtgtttctttcttgttttttgttttgttttgttttgttttgttttgagatggagtctcactctgttgcccaggctggagtgcagtggcatgatctcggctcactgcaagctccgcctcctgggttcatgccattctcctgcctcagcctcccgagcagctgggactgcaggcacccgcaaccacccctggctaattttttttgtatttttagtagagacagggtttcactgtgttagccaggatggtcttgatctcctgacctcgtgatccacctgtctcggcctcccaacgtgctgggattacagtcatgagccactgcgcctattatgtgtttcttatagaaaatctctctaattttttaataagcatgtttttacaaatgctgtttcctgagaactgtcgcaccacatgcgacatgccatgcatgcgactggaacatgccagatatttgtgggtggtcccttcgtgtcacctgtgccttcttaccaagtaatttgaaacacccgtgtaaactacctttggcaaataggatagctaaatcaccgctaagatttataatttactttttggatatctgaaacatcaacaatatagccatccatggcgtgttcctctggagtgtggtccgtgccgtctctgcctgctccatctggctgatcccaggcaggcagctcagctctcagcagacacagatccccagcacatatgaacgtgaaagaggcttctccgtgggagcgaagtggccagcaggtgtcacaggctgtgtgggcccagcatcgtgtgggcactgctgggggaatcccatcacagcatgtgctggcgttagtagtagactgtgtgtgtctcagagggtccagaaagtaatacagtaaaggcgcctgggggtgtgtgggggtggttggttggggtttgcttgttagtttgttgtaaaagcccagcttttcattcttggaaagatttcagccaactcgagagggttacctgccaggaatgctgcagaagcaagaactcagtgggtgagcacttccatttcttcaacaaatgcttctgagtccctgacctgtgccaggtgctcttcttgagctgagaatcctgcagggaaaaaagagataaagaccccatagtcctgtggtttaccttctaatgagcatacttttgtcgatcaaacagggtgacctctctggtgtctctgcacactacctgtatggtctttccgtagctgatggggtctcctgactagtgattggtgattttaatctggattttgccacagcacttattttctaacatatgacttaatttacttaataattgtgtctattgaatgtattcttatacatacacacaggcatgcacacacggacacgaatataagctttacaaggacagaaaccttattttttatttatttcttccttgtgtatcctgagcactgagaacagcctggcacaaagcagggctcaggaaatgtttgctgaatgcatgttcacactggatgtgttcgaaggctctcactcgcgactcctgttggcttgtggagagtgcatctagctgtaaaagccatggtgcttggatgtcttggggtgctgagcctgttcccccctcatttgggggtgtggtgctatgctggcgtttgggtccatgccccgcatttctgatggctgccccatctgccctgtgtggggtggcagagttctgtgtacacagagttacatttcgttgttcctggcttctctatggatgacagcagcactgataaatgccacacctgctttctcagcagtcttgcggggtgatttttcctcttaaggaagtcacctgatgtccatgctgagtaggaaatgcatccaaagctttgggagctcagtgttggcccctgggctgcagcccgagccccgttttagagctgtgtctcccaggcagctgtgatgactgctcgaaagcccactcagggggaaggtaaacctgatgcccgggtgtttggacagtgagcatggcgagtggaccgttacctgtgcatagagttgttcatatgtggtgacagatgttgggctgttatttagtaacttcaaattgtttttctttgcgtcggagccatgtctaggttctgagtgcttctcccaggtcagatggagagctcttcatttggggttgggggagcggggtggtgttttcaggtgcccaaggcattccatgcacatgcacctgcagggtatgtgtcatctggggtaagacagagccctcccggttcctcttctggatgtgtgcttttagtttttaaagaatgtcagtatatacattgccatttattcaacaaatacggactgagcattctgttgtgctgacgtagctacttggggttacagagacaaagccaactccattctccaaatggaaaacaaatggaaacattctagtggtagaaacagacaacaaacaagtagacagaaaataatgtcagacagtggtaagtgctatgaaaaaaatacagactcactgattgtgatggagacttttaagttggattctcatagaaggcctttctgaagaggggacatttgccctgccactgtgaatcagccatgagaagacgtggagaggaacatgaggtggtaggccccagcgagggaaagatctccatgatggcatcgattattcgctccacaaatattattgagcacctgctgtgtgccaggcactgttcctggtgtcagggttatagaagtggacaaaatgaggcctctgcctctgtggagcttttattaaagtagggaaggggatgggagggctgggtcacatgttaggtgtggggtacagggtacgtggtgccaggcaggtatccgggtacctttttacgtagggtattcagagaaggtctctagagaggtgacatttggacgaagacctaaaggaaagggaggggaaaggcgaggagcttggagagcttggtgcatcttggtgggggatggggtaaactgagtcagttatgtagggccctggaggccacggtgaggacttcggctttgactctgaaaggagatggcagagtttggagctggtgtgtacgttaacaggaccatgctggcagctgcgttaagagagactgtaagggcaaggacagaagtagagagaccagtaggagtaggctgttgccccagtgtagggcagagaagatgaaccttagaccaggatggtggagatggtcagtggagagaagtagtcagagtctggaagcaccagcaagactgtctggtgcacacaggatgcacgtgggatgtccagtgaggaggatgagatgaggttgggtggctggagcctggtgagtgacaggcagagagggctattagatcacatgggccctggagccatggtgaagaatttggattttgttctctgtgttggaaagttagcagagagcttatatggggggtgagatggcatagggacaatgttaataacagcaacgaatatttattgagcacttactgtgtaccagctgttgcaacagcctctcaagggttcgttctgctattagagccatgttataaatgaagaaactgaggcacagagaggttagctaacttgtccaagatcacacagttagggacaaacttgacagaattatgtgtgtcctggtatgtatttcagttttctttagggaaggtaccacaactttgggtaactatgcccctaccccaggatttaagatgttttgatggttgaagggcgatgtttaagagtgggaccagagaatattgaggtattaaaatctcactaaatctgtattcattatatctgtattcatggtataattcatgtgcctccccctttcgtgagcccctcaaacatgatcatggatatgttttctccacccgtaaagtacgttcatattcatagaaaacccacagagaactgcagacctgaaggtttctttgtaagagctttcattggatagctagaagggctgcagtaagtttaaaaaaaaaaaacccaaaccaccctggattccaggctgcacagcctctaggaggtgtgggtaatccctttataaagcttggcataatttctgttaagacttgcttattttgctctcagcttgctatcttgatatgtttgcctttgaggaggttagagttattgtgatttaatcacagaccatgtatttcgcaagattcatttggtatctccagcttgttttcttgtttcctcggctgtcagtccacaggcagaggtgggaggcggccggcatgggggaccgagtgtggtagaaaggagtgtttacttagcggaggggagtgctgagggctgctgttaccttcccagaatggctgatccccagcagtgatgagcaggctgggatcgtggtgttaaatttggtattttctagaaatatatagcaggctttcccctccacctgccccccttcaaggtttcgaagccttgtgttttgcaagagttgagaggggaacagttaatagcttggattatcttgtctctggagagaatttatgtatcaattcaccggaagactgctctggtattagggcaacaagaatggttttatttctcccttcctttcctgcactctgttcttatgtaattcttgtattaaaaccattcctggtaaattagaacatgctcttgtatttgggccctgctttgaagaaggctgctgagtctaaaaagtttggtagcctctcgtttctcatggtgatttctgagatttctagggacttggtgttttacagagcttgttgagttgcacaaaccagcctccttggcccttctaggtgataaaagatgctgggctgggagggcagctgtggaaaagggtgtgggcgagggagacagtgcttcatcctgcctggatgaagcatgttggttgttggtttattcataaattagaaaaatatattaagaattgaagttgttccttatctcataagatttctagcaggctgcataaagtctgtagatggtaatatccatttaaaagtggacaatgaaaaaattacctctttgggagttgtgttgctatctctaccccaatttggcaatctttaattaacttggcaacccccgttttaccaacaaagaacaacctttgattaaaaaaaaataaaatgtcagggagtgaaagatacggagtgtgactcagcagatgggaattcctttaataacacgctgggtgttagcgttagaaccgccactgaacagctctgcaggatgccctcccagccctccctccgcctatttggattagaccaggagactgcagcaaacttctcaaggggaggcgaacttggtgttggtatctgagcgattgtctgtttcaattgtttccctctgtcttggaaaacaccggcacaaaacacaaatccagtcccagttcctgcagctgctggggcgaagcaggctttttatgaatgaggcccagaagggggaggagagggcttgtgttacagcagcagttgggtaatacatttcattcacttgcagccatctagcccaggcttcattttaaaggatattgttcatttttggcaattcagattagactttttttcttccttgtgcaactgttggtaagttagaacacgaagcatgtgtgtgcattctttttgcttgcttttttgagtgtttgctcctttagttgggataaatggtaggagaggtaggaaggctttgtcatccccggggaccttgcttacttctccctcccagcaccacttaagagaagaggaggtggcctccctctccccaacctcagagccctcaaagcccttgatagtgagcctgagcacttgttaggaggtgacttctacctggggtgtgctggggtccacatgtgccagtctctctgccctgctccccgtgagcggctctttatttgtggcccttgaggccccattgttgtggccaccaaaacctgaattggaagctgtgtgacaatgctggtccccctccctgcactgcttcctgctgggggcagaacaaagagagcgggcattgtctctggcataaatgaacctctatcaaaacaaacacccagagagaggggcagcctggttacagctgcctgtgtgagcctcgacagtgggcctcattcctcacaaagggagctttgaggcccggaagaggcctttccttgatgatcgagctgtgcacagggagcaaaccccaagccgactgcttgtctgtgccaccctcaaacaatgatttccccaaattggacagcctgggtttgtatccttgagcacagttttgggaagagcattctgcatgaggcattgtagctatgtatatggagtataattctgttttcaggttgctctgccacagaggttaagaactccctcttccaaggtagacattgagaacagagacgaccacactgggttttcactgcagcttttaaacaggatgactcccagcccccatccccgtggctagcagcaagcagggactctgaaacactgcaagccaatggactgagcatcttacttttgctgtccgtgttttggtgttttgtaaacccatctggtaatgaccctgatgccccatgtcccagcaagggcataggtacctgccattgtgcaccaaagtccctttcctcatggccctggctgttctcctgcatggggtcatgtgtgtcccgttaccaagttgtggccccttttcaaccttgagtgccacatctgggctgttgtaggcatgggtagtacaagctgggtttgttactctaaaaatgaaagggaggatcagttgttaataccttcctgtaggtgcgagagggaatgagttgaggattcgatcactgtttatagccagtctcggatcctgattgtgaagtcattctttctggataataactactatatccagcatcttgagagtataaaataaaggcacatgttgtacgtcatctctgagatgtagcgatggcttggactttggaggctgatgagagaaaactcatggtggtgagctggagcagggtgtggctggcggattctgaaggtgctagccctagttttacagctgaccagggaaggtcattgaaccctacagtcttggccctgagagaaccttggaggacttaaggatggagaaaggtgacaaaagagatgcaagccaacagcaattttgtggaacaaagtgtgtacaggatttgaacttaactctgcgaaagacaggggttgcttgtatgcacgaattcacatctgaagaatgcatctgattgtggctgcaatttctgtggacgtgcaaacatctacctgtgcattttatttgtctagcatcattgaaagagttttttgcttgagttgatttcccaggtaattgaagcttacttctcaaagcacaagatattttttctcatatattagcggtcttaagtgagtgagacccctaagaattcttaattcctttatcttacttttcctacaggaaacttattatgttttcctagataggaattgtgctaccaaaaatgaaaagtaaacgtaatatgtaatgttctactggtaattgtttccattttaggttgacaccgaactaatgatatttaaattgtagctgacttgaaacacagtgaaaaaatggtttcctgctgtttttttaaagctggattcagtaacatgaaggtaattaaaaatgtacagatctcagtaatagacagtcatatgttgcttaatgacagggatatgttctgagaaatgcattgttaggtaattggattttatcattatgccagcatcatacagcgtactttcacaaacttagttgatacagcctactacacacctagggtccatggtatagcctgttgctcgtaggctgcaaacccgtggagcatgttgctgttctgaacgctgtaggcaatggtaacacagtggtaagtatttctgaatctaagcatagataaggtgcagtaaaaaatatagtgtaaaagataaaaaaatggtacacctgtatagggcacttactaggagtcaggcttgcaggaccagaagttgctctgggtgagtcagtgagtcagtggtgagtaattgtgaaggcctggataaatactgtacacttaggctacacttagtgaatattacattttatttatttatttatttatttatttatttatttatttatttatgagatagggtcttgctctgtcccccaggctggagtgcagtggtgcaatcacagctcactgcagcctcgaccgccaaggctcaagcgatcctcttacctcagcctcctgagtagccgggactagacgcacacaccaccatgcctgactaatttttgtgtttgtagtagggatgaggtttcaccatgttgcccaggctgatctcaaactcctgaccttaagtgatccacccgcctcggcctcccaaagcactgggattacaggcatgagccacggcgcctggccacagttaacttttttaataagtagaaggtgtacactcttaaataactataaaaagtatagtaaatacataaaccaataacatagtcacttattatcattatcacatattatgtactgtgcactgttgtacgtgctgtacttttatacagctggcagcacgggtttgtttgcaccagcatccccacaaacatatgaggaacatgtacatcttaccacggttgcaatgtcactaggcaataggaattttctagctatattctatccttacaggaccactatcgtatatgcacttcatctttgaaacgctgttagctgcctcatgactgtatttctattcctcagtcatgggctcaccatgcagtacacatgtgtggtcactggagggaatggaagaacactgaggaaatgcatagcctgtttcatatatttattacactattatttatttagaggaatgttaagaaatcttgcttttatgtagttttagaatgccatgaaatatctagttggggcattatctgccattttgcaaggtaatcttccacttctgaataacgttacaagtaacccgcgtttggaggactgatttgggactaaggcaaggaatttaggaggcacaagtagaggggaagaaataaacacatgacttttgtttttgtttttgtttttgttttttgaaagaaggacagtggtttgcttgttgattctgctttgagaggatggggatgcactccagagaaagtgaaacggggctatgggaggaagagagcagcgcacacacagcacctgcatttgattgtgaatgcgattgtgactccttaggcaggaaggagagtgctaagaccgtcatcatggacactcagaaaatacctgctaatccgtttactggaagatacagggagctgcagataattattgttttttaagatggagtttcgctggagtgcaattgtgcaatctcggctcactgcaacctccacatccccagttcaagcaattctgcctcagcctcccgagtagctggaactgcaggcgtgcaccaccacgcctggctaattttttgaatttttagtagagacagggtttcaccatgttggccaggctggtcttgaactcctgacctcaggtgatcctcctgccttggcctcccaaagtgctgggattacaggcatgagccgccactcccggccgctgcagagaatttttaaaataaatgatagattctcacagataagaagaacaggataattatttgccaaagtttgaaactgccattatattcaaaggcattctcttttgggagtggttttatatttaaggtttgaatttagatgacctcaatcttgaggtgttatcggagcattacaggggagtcttatatacatgcaggtgcgatttaatttgaagatacttccatttaaactttatgctgccagagttggccagctaagcaaaaagaattctgataggtcttattctcctccccatcccacacgctgattttttttttctttgtgtttggccgaaacattttacatttctcatttttcacagagctactgtttctctaggattgttttccctgaagtgtgtaccctgtgtttgggcagagcagcaagaccagacttccaaatggcatgctgcgttttaatgtgctttcataattgtctgttccaaaagggtgcctgtgtgtgtatggtgtgtgtgtgtgtgtgtgattcagagcacctgagagcacactgcccgttgtcccctccagcccttctgaaatgcaggccaccctttctgtttcagttgccccttgggtggcagtctgtgataactcaaggtcaggaggaagtatttgttttggttgtcttgtttaactaattaaatctttaatcttggtccttaaaagaaactaaaataaaatcgtaaagtagttctgataagtccttgccataaattattgcttttgtaaacgcacataaaggactctgaactgttgctactcataacatttctgacgccaaatgtgtggggttttgccataccaacaaccagttctctaactctccagacaccaactgggggccttacaattcagtgcagttctgacactcaccacctggagttagcacagactccacagggatgagggttcagtcccacgagtctgcccttgctgcagatgcgagtagcaggtatggggtgcccacacttctgtctgacttgcctgaaaggttgagagtttgttgccaggccccttgctttcaggtctgataacttgctaggttattaaacctgaaacttgataacttctgtagatgttgaaattagaacggcctcactcacctgggctcacaaaattccagaaagtagttgacgtcctattactggtttaccgtgaaggctctatgtccagagtggacaggacaagtggaagagtggcacagggcgaggtgtggggggtggcgtggagctccttttcaggagtctctaagaaggtgggactccagcggcaatgccttgtccatgtgctaagccagccgagggcgcacgaagtgctgtgtggtgtccaagctgacttgggagggaccagtttggggccagccccccagcctcacttgtcatgtcccacctctgctggcatctgtgggcttaaagtgccttcactcccatccttttcaactatttcttgattaaaaaaaaaaaacaaaaaactgttgaatagtaggagactctctctctcattggtatttgtgggaataaatattaaataaacactttctaataggtgttaccaggacgcctaaggaaattatctcacagagttttcaacactgtgaaaagagaagctgactgccagggagagatccctttttcctagtccttgtgaacatgtgctggacagccaggagtggcactgtggcaagaaacacccgttctctggcattagtaagagggatatagccaagggtatctgtataccagtgttaggcccatacatccataaaacattgatgtgagagctttagggcacagctgaccctaagcctaacgtgatcattaatgtcatgaaaattggagaattggtcaggcgcggtggctcacacctgtaatcccagcacgttgggaggccgaggtggatagatcacttgaggtcaggagttcaagaccaacctgggcaacatggtgaaaccccgtctcaaaagaaaaaaaagaaaagaaaattggagaatttataacgtctgatgtgacctgttctttaggtgttgaaattagaacggcctcactcacctgggacattcttcagctcatgccctgtacctggcttacagttgctcagtgaaatgctttcttgattgtagcatggtgggatttttataaatccaaatgacttagaggtaggtgtcacatttttagcagctaaaatcatactaatcgtaaagctcagattcctgtaagtagggcgctgagcacaggctgcatcctggatatatgaatagatgaaccagatcgtgtacatgtgggacacgttctttgtcctttgggactttcttttgcttggatgttggtagtaaccatgtaagttcgggcagctttctagaaactttccttgttgtgcaacattatgcaataaatgcactgctttgtgatatctgagacgttttggttttcttcagcttgtttgagttaaatttagactcctggcatagttttaggtttgaatgcattctctgagataggataaggaccaaaacatccactcagcagccagatgggattttatccttgtgctgccatttttgagactcatgcctctgtttcactctctgtaagatggcattaatagtgagggattgttgtgctgtgaggtttaaatgagctaatccctgtgaggagtttacagcagggcctgggccatagtgaaacactgtgtatgtggaagccacttcacttttgtcatagctttgttgtcattagtgtataccctgtctccttgccgtttatgggtccttctttcaagcagtcggattttctgtctgacatagtataagtttagaggaaacaatagcagctgtaagataatagtaattttccttctgaaatcattttggtgaatttagtcagaatatctgatccataaactctcattataaaacattgccttatgattggagttttttctgagaacagttccaatgaacatgattttttggtggtgaggtactatttctgtgcagtaatgaagttgtgaggacacacagataccacatccatgttgtttgggaattgtttgggaaaggtacgtgggatagcctggcatggggaagaatgatgttagggtattctccttgaggagctcagaataaccaaaggtaaagcatttggtggtataagatatattcatcttaaaaataagttgaaaataataagatattgggagatgttagccaccgaagtaaataactacagtgaaatagctctttattaattttgaaacctaaagttgaaagagttccgtattatttgtcagtatctttatcctcttcaaaaatgtttccagctttgggataaattgtgaataattgtttcactttgttttttaatattggctatgtagtgattttgcattgaactgtgatataagaatgatcatcagccccttgagattactgtgtgtacctgtgtcaccagtggcatataggggcttaaaagcaagcaagtttaatatatacattcattgagaacacactgtagactgttaggattttcggtgctggagccatagtgatgaatatgacaaggccctcacccttgaggtgcctatagtcgtgtggaacctaggtcctcgcagggactctagggcaggtatgttcttgaaagatttttttttttttttttctttttgaagagacagggtcttgccttattgcctacactggagtgcagtggtgcggtcatagcccactgcaagctcaaagtcctgggctcaagaaatcgtcctgtctcagcctcccgagtagctaggactacaggtgtgcaccaccatgtctggctaatttttatttgtattttatttttatagagacagagtcttactctattgcccaggctgatcttgaactcctatctcaagtgatcctcctgcctcagcctcccaaagtgctgggattacaggcatgagccactgtgccctatgtaaaagattcttatcaacagttaaaataagaagctgctcaagacatttacctatcctgaatgtttcaggccctcaaggtgccaggtagctgcaatatagttctagtgtagaaaagaaaaccctgatgaggtctatatattccaggactctgtctgaggccctttgacactccgggggcaccctgccgtgaccctgactctttcctgcatgtactgaggatggaggtagcctatgggtggcacagagatttgctgtctggctagcagtacttcagggtactgggtggcttgaggacctcctgttagaagcttggattcacttttcccaaggcaaccaggattggattctattagttctgggtcttgagagcctgcaagggcttccttctgcgaaggtgagtctgggagagacgccatggagtcagtgtgagttctgcagcctcccaagttccgctggcgtgagaggcttgcctggtgccagggctctgggcattgggaacattgcctggtctaccgggcaagaaacgtgaaccaccgcagtgaactggcagcgcgttggcatttttccctccatgtttttataaaaccgctgagtagacaccagattataaatcctgtgtaaatagtcttgaagagtttctgggttcagccccagagaagactggtttgggttttgaggaatacttcaagaaaatgtttgttggttctgttttccaacgtaaagtgctgcacaaggactgtgctgtgagatccaggagtgtcttttcagccctcagtgagtgcctgcaggggacacagctgctttggaggaatgtggttccggagggtttcccactctccatcctagttgctaaagtcacgttccacgtattgtgttctgatgatagaatgaaagcccactccccgcaccctggggtctaggtggggaaaggagaggtgtatatgggatagccacggggtttggcatgagctcagtagagacagcaaactgacccagacagactcccgctttagggaagctgggatgaactaagtgaaggtgggtcatgggagcaatgctgaaccactttggtggttacagtgaaggctgctacacacccagctttgggaggtggggcccagggtgtccagctttgtagaaaggcatggtgtgggggtggctggcggagggggtggtgggtggttttcctcttgaatctctgagaaccttgactggtgtactgctctctgctttcctaaggggtccgtagctgtgctggtggtttgcttggtatctgtattacatccactctgtgcttcagcctgtttgtccagttactgtgtctagtgaagctagcattcacatattttagattaaattccacactccacccccaaattaaaaccctgctatttaaggtaaaaataattttaaaatgttttattttggtctctttggataaattaatcttgaggaaagcaatacttactgaatgttgatgtgtgtatatgtctttctctttgtaccatacttaacaggcaagtaactctcttgtaaaatcagattctaaatgattttcttttcttttcttttttttttttttttgagacggagtctctgtagcccaggctggagtgcggtggcgcgatctctgctcactgcaggctccgcctcccggcttcacgccattcttctgcctcaacctcccaagtagctgggactacaggcgcccgccaccacgcccggcttatttttcgtatttttagtagagacggggtttcaccgtgttagccaggatggtcttgatctcctgacctcgtgatccgcccgcctcggcctcccaaagggctgggattacaggcgtgagccaccacgcccagcctctaaatgattttcttaagtgtaattcaggagttggcaaactacagcccatgctgccacatctggcctgccacacctgttgttgcacataaagtttcattgagtcacagtcatactcatttgctttcatattgtctgtagacaacctagaatgttagaaaattctttctctggctggacgcggtggctcacgcctgtaatcccagcactttgagaggctgaggcggccggatcacctgaggtcaggagttcgaaaccagcctgaccaacatggagaaaccccatctctactaaaaatacaaaaattaaccagatgtggtggcacatgcctataataccagctactcgagaggctgaggcaggagaatcacttgaacccaggagttggaggttgcggtgagccatggctcatgcatgtaatccttgcactttgggaggctgagacgggcagatcacaaggtcaggagatcgagaccatcctggctaacacggtgaaaccccgtctccactaaaaatacaaaaaaaaaaaaaaaattagccaggcgtggttgcgggcgcctgtagtcccagctgctcgggaggctgaggcaggagaatggcttgaacccaggaggcagagcttgcagtgagccgagatcacgccactgcactccagcctgggtgacagagcgaaactccatctcaaaaaaaaaaaaaaagttatttctctatgtaaacaaagaaaactctccttccttataacttgtatgtgttgggtctatttgtattctgtgaaccataagaaataagtcaactatcagctgggcgtggtggctgacgcctgtaatcccagcactttgggaggccgaggcgggcggatcacgaggtcaggagatccagaccatcctggctaacacggtgaaaccccgtgtccactaaaaatacagaaaattctctgggcgtgttggcgggcgcctgtagtcccagctactccggaggctgaggcaggagaatggcatgagcccgggaggcggagcttgcagtgagagatcgcgccactgcagtccagcctgggtgacagagccagactctgtctcaaaaaaaataagtcaactatctcaaggtaattacccttttgaatacttgaggacatcttttctgtgccctctgaatatttccttccccagataaaatatttctagttcttttacttgttctttgtttcagagttttaagtctccatttgataaagtatagtttaatagccttcgaaaccacatcgttgagatttaaaaagccctccttgagagacatgaccagtagaaatcataccaggaccgtttagcaccctaactctgggagccatggctcttgggatgcggctgaagattgtgttatcgtcctgaagctctcttggacagctgagtcaatgactggaggtaggaaagttccttgaactctttcttgtgcccttccagctgtgagctgtgtcaccattgtattatttttacattgttgttgttcttgaaaaagcttttttttttttttcaaggcagagtcttactctgtcgcccaggctagagtacaatggtgcgatctcagttcactgcaatctccgcctcctggtttcaagcatttgtcctgtctcagcctccccagtagctgggattacagacgcctgccaccatgcccggctaatttttttaatttttagtagagatggggttttgccatattggccaggctggtctcaaactgctgacctcaggtgatcctcccacctcagcctcccaaagtgctgggattacaggcgtgaaccaccgtgcccggccaaaaaagcttttgaaaacttcgtcgtataatattatggccatccttccaaacgtgacctttttatgttgtattttatctaactaatttgcccttgcccccaacttttatcttggaatttcttacgtattaatatactgtcagggtccctgcttggggcattgtccttgggcttgtcattagataactccaagttggcttgactccagaggagctgccttcacacgtgctgtgaaatgtactgttgttgaccagagaccatcgttatcattaagtccacaaacctgcttcctgtctcttaggctgttccagtcttctatcgaaaaacagtggtttaagtggcttctccgatagtgctggtgaattggaagcttctcgtcatcccccttggctggggcgaggcttacttcctggggccttggcagttttgatctaactgacttatgttacctttctgtattaatcaagcctttttattttccatacttctgatgctttgacatcttggggccttgctgaccctgaagagaccagcccccctagggttagccagttcctaggtagtgaatgagtacaatgctcatatgcaaaataaccaatccaaaggccacgcccctcactcatatgcaaaataaccaatccaaaggccaggccccttaccacctttattgggatttcatactccaggccaatattgccctaccttaatcaccctagggccagataccaggcaagagacagcccctacaccccagagcctgtcagaattactccagccagctagtcctaaacctgcttaccttgtgtgatttattccttcccaaggaaaccacaataaaggctctcctccatgttttcctaccattccctctgcctcaggaccaaccttggttcttctccgtgtggccccttggcatggtgcactacctcttcttggggactgtgagtaacagactttttcagtggcaattgtcttttaactgttggcctcaccgtacctgaatagcagtaaaccctacatcttaaaatactttgagattgtcacatacagtacccagaataggtgaggatgaaggcaatttactggatgcagagcggccccagtccattccttatgtccgaatgctaagacttgagaaaggtggagaggagcctgactatcaagagttgccttcttggatgaagtgggctgaagacacacgaaccccttccattaatacatctacatattttccaccattgtaattgtattaataattggagaaaataacaatgactgtcaacaacaatagcttaatccagtagagatgaggtccggaataggttctggcctacctcagttcatgttttttactttcaatgctgaagcacaagcaaatgcaaaagcttctcttgaatgttttgtaaattgtgggataattgaggtatgtgacatggttaataacccagtgtctgctcattgagcactgggttattaaccatacatagcaaatggagcacatcatcgtgggttgcttgcgtcactagatcctgttgcaaaaccaagattcaactttaaaatacattttaatttaagttactctttctggcatgaatgatacatcactttggagcaacacttaccaggcagtgaaagctttttttaatgccctgtgtagcactgctttcggtgcccttatatgatttggatggatggatggatggatggatatagccacagggtcttgctctgttgcccaggctggagtgcagtggcaccatcatagctcactgcaacctcaaactcctgggcttaagcgatcctcaacctcctgagtagctgggactactacaggtatgtgccactatgcccagctaatttttaaattttttgtagagatgggggtctcaccgtgttgccggggttagtctcagacttctggcctcaagtgatcctcccaccttggccttccaaagtgctgggattacacgtgtgagccactgtgcccagcctgtttatatggttttaaaaacaaaaatgtatatgctctcaagatggctttcagagagcttattagtgtcttggccatttggaattccatttcacttaaattagaagagtgaaagagaaatgaatggaagaccaaaaatggggagaagaaattgtatctgatataagcgtggctctacctgggagaatggccattccgaattactggaaacaggaagaagacttgctatgatgcttccttatatctgtgggggaaaatcaaacttacattctgaaaggaaacttaatacttcatgtttttaaacacaaaaggatattttttcagagtagcagttataaagttgttagtttaatcttttagttcagctttttttcttaccagaaaaataattagtagtacaaaaatttatgcgtttgttttagctctattctgatactgttaagaagatacatgacataaaaacaggaatattttcagtcagtgattacaatttaaaatcatattcgaaatttaataaaaagtttaaaagaaatcaccagcataagatgttgtcatttggctcttggggcaaaccagctctcttctggtgaaagaactttctggatgaggtcgaaaggcaacagaaaacctggggaacaatggctgtctttttaatgggagttgctcctattcctggtggtaacaacctcttcctgttgctcctttccgaatggaattgcctcagtgaagttgttgaagaagtgaggagggcgaaatatgcccatccttctacagtggggagaggcctggcgcatgaaagcaggcctttgtgtatgccgggctgggcccatgcaaacagggcacaatcaggctattgtttgtttgggaaaagctatggcatcctattgcaattatttatggaagaaaatatttgatgtttttggaagaggttaggtgtggggggtgatgagggagggaggaaagagactgggcttacctcttgtcccattcactccaaatctctcagtgcgtaggatagggtccatctggtccaaaggagagttttgtgtgactctgtgtgttggagtgttttcgaaatgcagagaaattcagagcttctctagctttggctagagaaggaacaatggaagtgagtcttattctacctaagtttgatgtggggcagcctgttctgtagttgccttccaagcccttcttctttctgatgctttcttggtaccattgcccacatgctgcctccaccctggatgaggtctagacctgttacattgattctcaactaattaaaagtcaatatggtaaaatatttgcagcattccttctccttccctgtgttcatttctgaagctcaacagtcttccatactcaagctgtggggaggtccctttctcctttgacaccagccattttgtgatctgccctttcaggccaccccagccaccctactttcccagtcttgcctctgcctacttcacctcttctctcgaacctcagaagcttctggagtcttcacagtggccctaatcatgggtctcatccttgttttcctgtctctttgaggttccagcagccagctttgcctcatcaggcctttctctgaaattcccatcaataactacaagatctgcccagtaccttgtgcatatcaggtctcaggaaattgtgagtttcttgtttcattaagcatttttctttccaggaatcatcattcatcgcattgccatatgtgtccagatcccccttttcagggagccagtaattcgaaagcacttgcctgtgttgaatatggtggaaaaaacaaatgtcaaccctagccggccatcactccccatcggcccaccccattctcttgtgccagtaggacttgcctgtgttttctttgggcagttcaaagttgggctcttgagaagttgcctgtaaattcaattgaagtgaccagatctcatccttacccactctgtagctgcagataataaacactggggacttcccttgtgcctgtgttttaatgtaaccttaagacttgatgctccctggagtgtaagaatatgaatagctactcgctgtggatattgcagttaattactccttcctgtcccatgtggtccccagaggaatatgagattgccacaaacatggcagctttctttggggaggtgggagagggagatgaatcttggggcaaggcacattctcataaccatgtggctccagaaagctgcctgactcagagaatggctataaatgcccggttgtatggatctgagatcctcaaagccaggttcattcacttatttattaatttaacaaacattaggcagctgtggtgctctgtctgctccagcagtgatcaagacagaaaagatttcttcaatgctgcgtgtggtggctcacacctgtaatcccagcactttgggaggccaagacaggcggatcacctgaggtcaggagttcaagaacagcctggccaacatggtgaaaccccgtctctactaaaaatacaaaattagctgggtgtggtggcccatgcttgtaatcccagctactcgggagtctgaagcaggagaatggcttgaacccgggaggcagaggttgcagtgagtggagatcatgccactgcactccagactgggcagcagagcgagaatctgtctcaaaaataataataataataataataataataataataatagtaagaatactggggtggggatggtaggatgcacagtaaagagaataataagctagtgatgagcatctaagaagaaaacacaaaacagtactgtcatcacaatgcaggagtgctgggttgggggccaggtgtggttgaggggtgctgtattacgctgggtagtcattgaggcctctgtgaaaaggtggcatttagactaagggagattggaaggtccagccatgggaagttcaggagaaaggataagaagaaaaagctgtcacatgggcacagactgatgaccagcaaggctggaacttggaagatgagggaaactgagagtgattgtcagctcaggctgctttgacaaattactgtagcctgggtggcttaaacaatagacattgcagcattccctctccctctctgtgttcatttctgaagttgaatagtcttccatactcaagctctggggagatccctttctcctttcacaccagacatttcgtgatttgccctttctgaccaccccagccctactttcccagtcttgcctctgcctacttcacctcttctctccagcgtcatggttggagaagcatattctcatggttctggatgctgaaagtccaaggtcaggtgtcaacaaggtctggttctagtgagggctctcttcctggtttgcaaacagctaccttctcactgtatcctcatatagtggtgggagagagcaagctgtggtgtctcttcactgattaaggacattaatccaattgtatcagggtctcacccttatgacctcatttgatcttaattgtctccttaacagccctaccttcaacagagtcacatgaggggttagggttcctacatatgaattggcagggtggaggtgggaggtggccggggatgagacacaattgatttcatagcgtcgagttataagatgggtcacagtattagatgggaccagagcagagagggtctgtaggccatggcaagagtgagaatttactcaatacacagtggaagttggggatgagtgagaagcacaagagtggcacactgatttctacaacagtcagtctagctgctgggtggagaaggggagaaggaggaatagtggaaaaagcagggagaccgcttaggaagctgctgggaccgtgcatatgagagatgttggtggcttgaaccagtgctgggtttctcagcattggcagtattgacgttttgggtgaaataattagttggggagtggcagggcggggggtaggggtgcagtcctgaaccagtgccaggtttctcagcattggcactgttggcattttgggtgagataattagttgtggggggctgtcctgtgtattgcaaaatgttcagcagcttcactagtctctacctgctagatgccagaagcccacccaccccgccccctagtcatgacaatcaaaaatgtatctagacattgacagatgttaacctgggattagggggtggggagaccaaaattgtaccctgttgagaaccactggaccagagtcatagcaatttgcagtggatagatttaggaatatttgaagacttgtaaaatatagcctgaagggaatggagactgggagagtgaaagatacctctgagacattttggcttggacagaacagggggtggaggcttccattcctgagctgcaaaggagtggggagggaggagcagtgtagtttgggaagtgtgtggtggagaaggcagatggggcaggagctctgtcttgcatctctcaggtcagaaatgcctcagacatccagggggggcaagctaagatggagttgaacacagcagtgtagggctcaggggacaggccaggaatggagagaaacatttggcactcatctacttgtagcttccctgtcgagaaaaatgaaatcatccaggggttttcaaattcagtggtctctggaccccttcacactgttaaaaatggaaaaccctgccactgtctacatgtttatgttgccccagtaatctatgcattgaaacctaatcaccatgtgatgatattaggagctggggcctttaggaagggattaaatcgtgagggtgggggacctttatgaatgagattgtgcctttataaaagagagctgctttgcctcttctgctagaaggtgccctccgtgaaccagaaagtggagccctcacaagacactgaatctgccagtgccttgatcttggacttcccagactctagaactgtaaggaataagtttctgttgtttaaaagctacctagtttaaggtgttttgttataggtgcccagacaggctaggacaaacgccaataagctttcgtttatgtgggttgtatccattgatacttgctgtatgaagaattaaaattaataactttaaaaagatttattgattcagaaacagtaacaaaacttaatatgcgttaacgtacttttatgttggataaaaactatatcccaccccagtatatgaatagagtggcattgttttatgtgtttaatctctggcttaacagaaggcaattggatgatcatacctgcttctatgtttattctgctgccaatatcacacagcttctggaaacttccacggcacacattcatgagacaataagagttaaaaaggtaaacagtgtcttagtagtgtatgaaaatagtttaatctcatagaccccctgaaaaagctgcagaatccttacgcgttcacaaaccacactttgagaactaaagatcaaggagtacagttttctcatttttatgctgttcagagtgtggttgaagttcagccatcactagtccttcacggatagttcataccccaagttgatggccttgtggaattgctgatgctattttcatatatatatatatataattctagcctttttctctggtcttataagagtcacatacgtaggtaatttcatatcctacaaatatgttctaaacagcagaatattccaggaaaccttaagtgataactgagttgaaagagtcatattttttaagcaatacaatttaaataatttttaaaggaaacatttctaaaggacgttttacattgcttgcattaaaaagaatataatgaacataatccaactttttctcaatactcagggtcatcactgtgaaagtaacttcattctatgataagataatgatgctcccaggtgggcaaggcagtttttcatctaaggtaattgagacaccttttaaaagcaaaagataaattcacagaccctcagtgtcattataaattacttggtataaagatacttaaatacctacagccttataaggcctaggtgtcaattttttacgcttgcagatcttttacaactgtaagttaaatgattttacacattaagtgcatataaaacaaaaagattcaaacccaaatattaatttaatgacatgggtaatattttgctaaaagtaaaccactgctcagaatgtgaataaactgacctcgaaggcctgagtacgtttgaattacggaacacctctctttgacatcacaattgaattttttctttaagtatcgcaaggccccagttcacggaagtaccacaacataaattggtcttcacttggtatgtgaacacatatttatatgttaaatgtgtcttttctttttggtgtacaacagctagagtaatgcagtttgcttgcaatgtgttttttatgtaaatgctgatgccgaatccacttggcagcactgagttacaagaaggttaagtagatgaactagaagatggataaacgaagatagataaaatgaagaaaaacaaaaatcaaggagaactcaggcgtccaagagtgtgtaaacaacttctggtgtgagacgcgctacattgcgctaaatggcctgtgcgcttctggtttttcccttcctctgttgattttttatagttgtcttttattttaaacacgcctcccccccccctttttaaactgattttaccatcactctctctagccctgcctccctagaattagctgcttcttacctcccttggatctggaacttaaatattaacgtgtatataagttaatagtaagtagaccgtgaatttagaagagtaaaacagaatcatgagtacgtagtcactgtggccccttttctgctggatttcaagttcgtaagcatttttggaagagagtcgaaggggaaggggtggcttgccagtcagttgagtgatgcgtgagggaggcgttaaatgtgcatgatgcactaaaatgcatgtttcgagatccagtatgactgctcttccatagatgatgaaaccaaggcagagaaataagatgtaactctcttaccttgattagtgatgagaatgggacagctttattcatgaaacccggaaaccactagcccattcttgggatgattgatatctgcaaggatcttcaggaatagagtacctggggctcaggagccaagactagaagtgttgaaaggtgagcaggaattagctgctggcctcagacgtggagagacacacgggtgtatgtgtgcacacacacacacaggcacatgtatattcatgatggcttcttaattcccactccaggccaactcatttccctttcccttccacaggtacttataccataaaaggtatatgaagtgctaaaatacttgtaggtatgttgtcaatatgagctactctgtaaatgataaataataattgactggtgagtctaggcaaggcaagtcaatgagattacaagaaaagagatgttaggccttcagaaagatggaaatttctctttgtccctgcagggactgttgcagagcattagagccaccctcaaacagttacccagtgagtctcctcaaagcaagtggcactgagatacaaccttcctacaggttttcaagtcatctcgtgtggtgcacagtcctcgccctacctcgaaggcccgggcgaagttttcctgagtgtgtatactcatctctttgtgttgtctctggcagggagcaagtgagtacaggattggagtaataggcatttttaggcttgagatggctttgtgtgtttggttaatgtcactacatttcctaggggataataaaagtctagcatgataaaagatctcgtcttacaaggtcccgatgtaaagtttggagcctaacttagaatttaaaataaaatacattttgacccattgtattgagagctggtataatttaatatagtgagcccctcggcttctggttggttgggttataaagcttcttattcattcgctcatccattaatgcatttctcctatgaggaagctttttcctttgagctgaacacacaaaattaatcgtgctcgaactctccaaattttgtgagttccctggtaactgactgtatggaagacagaaataaaaatcagaataaacttttattttctgaatcagaaagcagttgctccagcttttggtggtcacattgctaagatgtaaaaaacagaagttaggtgaaataaattaagaataattattttggagaaagagagggtagtgtttgactaaattagaaacattctctgagtcttagaagcgtgaatgatttaaatgaggttccagcatagtattgcatgtggtttctattttagagttttcccacttgaaaacaaactttgaggatttttattgaagtccatcagttttaacttactcaaagcttagcagccaccttttgcttttcttcccgttccccccacctcatgctgtgaagaaagtcatacaccattgtggtgttgattgaaacctttatttctccaggtctcctctcataaactgggctaagaaacacaaaggacatttgacacttcatgactacataagatgtgctgttcctctctctttctgtttgaaagtgacttggcagggtgaagttgagaaccccttggaaaggaggaagccgaaatgcaaacaaagttgaatcatgaagtgatgtcactctgaaccaattggagcagtggtgtcatgtgcctggcagctacttcaaatgcccacaaaacaggagtaatggtttaagctgtttccctcttcccctcccaccaccaatcagcagcagactgctagaggacagatgcaaaacagttattagaccaggcttagttagacatggaggatgcatcttaacaagttagtacctttttgcaaagcatgaagactaattcaaagtctattttctggttttgctctaccagtacggccaaaaccatttctttttaagtgagaagtggggatatggtcaggtttgattccagttgaagttgtgagctgcacagggctggtctgagcccagtggcatctttccaggtgtcagagccatgattttaagctcctgttaaattcacagtgcttagtaaccataacttcttggtttcatgatcataggggtttttgcatagctgccacccccattttctgtttgtgatccagtagttaaaactcccagaaaatatttctcaccctggtttaaataaacaaaacagccaccacaaaaacaaacaaaaacttggctaaccactattttcaggcatattctgagagagaaagagggggaaaaaaagactagacatcctaaaattaagcaacattatttttggaattgtgttgtttcttatactcagtcatttgtgaatgatgtggttcaaacaaaactgaaacaaaaatagtttttctcattaaaaatatgtttgtcgcatagccagcactcggaactagggagggtaacatggaagtattgtcattctcggggctgactggttgacagcagcctatacaggagtggagaatattgacagggctgcccgttctccccaggtcgaagagagcaaatgcacatccctgtgtgcacggccacctggttcctctcctcacttgctggtgagtattgaacggctcacataattaggcagaactcaggaactttcctccctatctctttcactcttctgaaatgccctttatgttttcctctgctctttcagtcccagtgccttttctctggtgcagcctcatggttcggtctcaccttcagcttttccttccctccaatacatcctgtaaattattgtcagacttcttcttatctaaataactcgtttaggtaaggtactcatatgttcaaaataccatggtggctccctgttctctgtgatgtgaagtcctaaccattagactcagctttcccccaggacaccttggcttatcttcttgctgctttccagaggcatgggccattaggctggttttctgaaggttctgccaaaaggctgggcccttgtctcccaccccactgctgttactcatgtgttctcccacttgctcggcattctttcccatgctttttccttgatcatcacttactagctaacatctattttttcctaaacactctgttgcagttgtagtctgcagtcactctcctaagacttgatcatctattacgctgtttcgttctttattttttaacttttcttcttcttttttttttttgaaacggattctcgctctgtcacccatgctggagtgtactggcacaatctcggctcactgcaacctctgccttccgggttcaagcgattctcctgcctcagcctccctagtagctgggattacaggcacgcgccatcacacctggctaatttttgtatttttagtagaatcggagtttcaccatgttggccaggaggtcaggtcgaactcctgacctcaagtgatccacctgccttgacctcccaaagtgctgggattacaggcatgagccaccatgcccggttgttttgttctttaattttacaaacttggcatagcttagaagaccatatacagtggcaccatatacagtggcaccatattagtggcaccatatacagttttccctgagaaaactggtacctcccaacagataccaaaatctgggaccaccccaacagataccaaaatccacagatgctcaagtcccttttataaaatggtgtgatatttgtgtatagcccatgctcatctttccgtatactttaaaccagggatccccaacccctgggccacagaccagtcccggtccatggcctgttaggaaccaggctgcacagcaggaggtgagtggcaggccaactagcattaactgcatgagctccgcctcctgtcagatcagcagaggtcctagattctcataggagtgagaaccctattgtgaactgaacatgcagggaatctcagtaatgcctgatgatctgaggtggaacagtttcatcccaaaaccatccctctcccccacccatctgtggaaaaattgtcttctacggaaccgatccctggtgccaaaaaggttggggaccactacgttagaccatctgtagattacttataacacctaatacaatgtaaatagttgttatcatgtattattagggaataatgacaaggagaaaagtccatacatgtttaatacacaagcatcctattttttttcctgaatatttttgatctgcagttggttgaatccatgggtgtggagccctcagatatggagggcatgctatactgatcacccctatgggtgtgaatgttgggcagatcctccagtgtcaccagccatgtggccttggtgacctttccatacttttcaatcagaatgatgatctccacctctcaggaaagttgtggggatgaaatggtatagtctgtgtgtgtagagttgttaggctggggcctgccatgttaaatgcccatgaagcaggtaattatggtagtagtggttgatatcttgaaatcagggggattcccaaatttctaccccaaatctggatgactgcatattgcgggagttcagtaaatatttgttgcactaatacttatgtgcatacgctgaaataatctaaatatttaaaaaccaaactaacggtaggactttcctcagggatttaacgtttgctgtagaagactgaatgatagaatatataagctgtatttttcttgtgattctacacattgtccatgttgcaacttaaatatttttggaatgcaatgtaaaagtgatttactgtcctataattgttttcctgaaagcaaaatgatatttaagtgaactgcaatgaaaaatgcaacgactgtaatttatcgttgaagggcattttcaaagtgtatagaatgactaaagcttaagtgtattaaatattctagaggaagacatatttaggctataaatctagacttcctttggaatttgtttcctttttctcagccaggtgtatgaagattttaagttcttaggcctcagtgggaagaagatttaaggttccaagagtacatttgtatctcttttaaattttctattgtttatcagtgacatatgtaaatgttttagggagctgtttactgtaacattacctactttagctctgtgcagttgtctggcaaccaatgtgataaagacagagggaagtgctgtattttgttgctgacaagtatatcttaaaagtgcaggtgcacctgaataggcaataaagtattaagagctgctcctggagcagtttgctctctgtgacgtgtgaaaagtctacggggtttataattggtctggccatacggctgcctaggattagactcttttcatatcccactaaacactctccttagaagcaagcacaaggagatagtttattttaaaatgtaattgctatgttactaagatttgaatttgagtaccgagaataaaccatatttctgtttagaggctggttggcttaaaattgtgtctaatccttcccctgccccccaactccgaatcagagaatgaataacaaataaacatgacaatgaagtctcatgctgttgttttcatatttgtatttaggagtttcagagcaaatgacttggaaaacaggcaaatccactgacataggcatttttagccaccttggaatccgaggagggattctgcactatgccctgtaacctcgttcacatgccgtttgaatgtataccatgaagaccccttagctcagggagctttgctctatttaagtaatgtttatattcttaatgaaccaaagaggaagtggtcatgggaaaagagccaggactagatttcattctaatgcttataaggagagttctaggaaaccctcagacttggtaaaccaaggcatttggagatactatgaattggtttaaaaggccatttaccacttcttttgtaattggccttttaaaccaactctcacttagctgattaaatgtggtcatttaaactgctagttaacaatcggaagtgcagtggcgcaatctcagctcactgcaacctctgccttccgggttcaagcgattctcctgcctcagcctcctgagtagctgggattacatgcgcacgccaccacacccggctaatttttgtatttttagtagagatggggtttcaccatgttggttaggctggtctcaaactcctgacgtcatgatccacctgcctcggcctcccaaagtgctgggattacaggcatgagccaccgcgcccggcctaagatttcttattgtggtattctgcagtggagaatgggagttggaaagaaatgttttctcccacacctgtcccgctcctgtctactgaaagctgattaatcagtcagatagtgagttcctattggtagtacgcctccaaaatttggaagaggggaggtggcgtgatgtgaaaaagcaaggctttagggagagattcccgctgggggcattcaccctctggtccagcgtgcctgttacagtgatcactccatagtggttttgcatgaacaagactgcccagtttgcttaggaagaaaacaaaggacataaggtagttctcatgtcttcccagcaccctaaatactcgggctaaacttccacagtcagaccgtcagcttcaggaagggctgctgttgggaactttttttttagtttgcagttagttcagctccagccaaaaacctacaaaaagccactgcaagccctctgcctgctcgtataagacaccttggttgggcccctgtgactgtccatccataggatggttggccattgactgcacagagaggtagggcaagataaaacgactcatttgtggatctgactccttgtacttctgtttggattcaaacagaggaagatagagtagtggccttgggaaaccgtggagagagaaaaggcatagtcagaatgttttcagaggagcgcagacttttcaaaacccctctcatcacgttcccactgaccttcagttccagtgctgtggccacagggtgtctgcaccccaacttctttgccaagaaattaatgatctgtgaagacacacagacatgaggcggacttactatttaaaggaatcctgaaacgaatatttttctgatacatatttatcctaatatatttgctgagcatggtttttttttttttttttttcctattttggagtttttgggttttttaagcctagggaatgcctaatatgtactgtggagtgcatttgttcatttatatcccagtgcattgtaaaatcgagcaattcagtgccttagaatcctttctgtgaacttgatgctacgtgaactacttgagaacaactactttcaagccctccgaagcactcagttacaactgtcggtctaattgcacattattctaattcattaaaaaagtccccaagggcttcttaggatactgctctatgttattagaagtccttccaaatagaaaaactttattaatttaaaaataaccgccaattcagacttcgattcaaacaaggcattttaccaagtccggctgaaagagcttcttaccacatctggcatgtagaatggcagaagactatttttgctagattccttgttgctgcagccgtttctgatgtccttttccccttcacacctttcgtgttacacatgtctgagatgacatgatgctaagtaaccaaagtactgctgcgatggaattgctctgatgtttttttccagagtgaaagctgctattactttaaaaaaaaaaaaacttgaggtttggtttctttccccctctatccgggtgttatacaaatatgtaattaagatgtttgggggttcagatgacaaacaaggagtctacttctaagaatgcatttgcaagccaaaagagtggtgaaccacttcagagtgcgggtctgtgggggatgatgtctgctttgcttcgttttgtggaataatttttaacatttctatttagcattcatgatactctaaatagaagcaggagaacactgtggctctcggatccaggagaggcaggccacgagggctcctgctgtttggggacagtctgtaactctaaatctttttatatgcagcaattatgaccttaaaaatgggtgactctaatactggcattcattgcctaaaaataattttaatgtgcaaatgccagagaccaggtcatctcagaaatggactagaattgaccactgctatgttttggtgaaacctgataaccttgcttttctccgtgtaccttgtttttcattgtaaaactatttaattatgaaaatgagagtgtgaaaggcaaagtatgattgaatttagggggcagttccatatagttgtaacaaactgattatcaaatgtccaccattagtatgttaaaatacggttttctaatactgagacaacagggatggagcagcctatccactgaagtcttgttgtttgtccctgctgtgtcccaacctggaatctctttcttcttccttcagcagacccttcgagatcagcttaagcttcactgccttagagaaactttcctgtctacctggactgtcttctagatttctagagcagtgttcctgcccttttcctttctaaatggggtgggagttctcagagaactcatctcctttatggctttatccatcacagccacacagataggttctgtctggaccatccttttccctgagctttcttctcctttgccatgtgttttcatttctgccagacactggcactggggaagcctcccatcgtctcagactcagggtgtgtgaaaaacaaacctgctttctggactctacagtttgtgcactagcctaagccgaaaatcttgaaatctgtcatcagtgactattgtagtccataggaatacccaagactgggtaatttataaagaaaagagggttagcttttttttttccggctcatggttcttcaggctgttcaagcatggttccaacatctgatcatcatctttttttttttttttttagatggagtctcattctgtcacccaggctggagtacagtggcgccatcttggctcactgcaacctcccacttctgggttcaagcaattctcctgcgtcagcctcccaagtagctaggattacaggtgtgcgccaccacacccagctaatttttgtatttttagtaaagatggggttttgccatgttggccaggctgatcttgaactcctgacctcaggtgatccccccaccctggcttcccaaagtgctgggattacaggtgtgaaccaccacgcccggccaggatctgatcattttctaggaggcctcagggagcttttattcatggcagaaggtgaagggggagcagttgtatcatggcaagaagagaaagagagacgccagatctcctggtagataactaacagagtgagaactcactctttactgtggggagggcaccaagcccttcataagggatccaccccatgacccaaacacctcccaccaggccccacctccaacaatgggaatcacatttcaacatgagatttggagggaacaaacattcaaactatatctacgaccaaattttcctaattcctttctacttaaatgctttcttttccatttatttcacccacatctgaccctaggatttcaacgtgttctaaaatgaatttcttgcacccattttcactttctctccaccagaatccatctcaccacccacctgccagtggcatactccttgcatagaccctgctctagcatgaatatagcccactgttatctgttgtagaacctcacgcccagcttcccaccctgtgtgacatcttcaccctcttgccctggcttgtgccatccacattccgatcttgatgactctggttctcttctctttgacggtggagggttgatcccttccttccccatgatcataaaaggtcatgccaacactcctaaaacaaaagatagattaataagagaaaaacctaacaaatttattatatgtgtgcatgggagtcatacaaaatatgaaaactcaagaaaatggccagatggttgatccttaaatgctttatttattggtgagaaggtattgggggtgtaggagtaaatgattttcagggaaaatgaatatttccctgagacagcaatttacttgtaaatgatgctctttagaatttgaacacgctccagaggcagaaattgtcttgtgaaaaagtctgtctgggtatggttgcattcctcagtcttgagctggtggatggcagggtgcaattgcaggccgtagtgttcctctttggggatctggtttctaggtgggtaagggaacttcagagaacagccttgtcctgtgctttgcgagagacaaaggatgaggaaggggggtcagggaccttgaggctgcttcagcatgtcaagagtgccatgtttgggacgcctcaacactggaaatagccttcattcctctgcttcttgggtctggatccttttctttagactccaagaaattcttccttttgccccaaactcacattgtttttgtcttctgtccctctacttctatgtaattctattattatgcacagattctgtgtgcccaaggagactgtaaactccaggagggcaggaattatgtcttaaaacactagcggttaaacagttaagaggtgtcttaaaacattcctgtagccccagctacactcttgggtgcaggaatcacaagtgccttattccccacagggtccccagcatattccaggagctcattatgtttttaaatgaatgacctactgaaggcaagagaccaggaaggaaagtttgtaaaagtttacattattagattacccctgagatgtgtaaccttctcacgagttagatttcttgaaccactgcccgggtattgtattcctactctaggagcttgaaggattaatgataatccttttacagatatattcacaagtttctgtgaatgtgaattaagtatgtagatcttgattgcctttcttgagtgcatggtttttttctagaaaaacaaatttaagttaggtgggacacctaataaagctctaggctcctttcttttcctcttttaagacacagttaattaccttatgctaagttggaatataggaattatcttccaaaactgtgtttgcttgctgtgtctacataaaaattgatacaaggtatgccatggtttatacaatttctggcacatttacctggtctctgttacaggtttgtgaaaccaatttttttattgtaaatagtacgttaccagcttaattgctttagaacctagacagtctatgtctgtgatagtaattacattctttcatgactttgtttggtaacctgaatgttgaactagctctacagatttaggtcatgtctgatgctagccattcctaggaaaaagtggtgaggactacattatgggcctttccccctagacttaaaactgtgaagaagtcattttgggttgaggtatcccctggtaccctctcctgaacttcaatagaataacatgatgtggtgaatgaaccatattagaaaaaccagccaatcagccaagattcttgtattgactcttctgatctccctctacctctcctttccccatctgccaaacaaagggtttggaacagttaaattctaaagtggtgtcattgatggctctcagtattctgtggactttcctggttgattcagtacttgtgattgacctggaccccctggtttggtccagccttagagcgggtttgcaggtagacaccttcctaatgtttgttccacgtaagcccccggagcacagtatttccatcagctattttgtggaagtgagcgattctcttttggttgtaaaccttcactatttcatgtgggtgacttgacaatggctccatttttgaatggcccattgatagttgtagtctaaaaatttccagagattacacaagggtttatttaaagggaatgggaatagggagaaggtataacctttccaaaacaatctttaaggcaattataagctgttaggaaatgtcatgtaataataacacagatacccaagcttatatcacataaatcattcattttgcatgtttttgacagggagatttattttccaggttaaaaacaaaaaagaaaaatcttaaaagcttaagcttttattgtttgctttttttattaaaaagtaatttggagccagtaacttaacctgtttttcataaacatgctatctagaggcagccaaaaaaatattcatgcttgcatagtcagggtcctcaaatgaacttatgtgttggatcatgataactctggtaattactcgaattacccttgttgagtaatagtatggaccctgaatacaagggtttgatttatgtggccagctctgtgctgctgggtttatgaggacttgccagatgtcatctcctaattaaaatccttctttacccttaatatcctctcctctgtccccaagaaattaatccattctattgctggagcatgtaacagctgatgttgaagttacaagtttacagcttgaactttgcctagactgtaccttttttgggaaagagtttgcaaagcttttaagcctgactcttgtctttagatcaccagcatcaccatggtgcctggcatcagtggagcctcagcaagtgtttatggtggaaacctcagaagctgtcactttctctggctgtaacagttgtcatctttgtttacagggaaaatgctcttgagaaaatggaggtcattaaacactccagcttcagcaatatcatcagagctttccgtcacgtgagttatctcacaaaagggtcagattctggtaaaaactcttgccttcacacttacttctgttttattttgccttatttgacatttcaccagaattgatccataggttcaataaggctccattctgttgggacaaatcaagctagaaagacactgaactctgggggttaccagaaatatctgaaagcaaagcagtgactgtgaggtgggaatctctctgagaatcctttgcagaaccatgtaacagctctgcatcactagacgagccaagcgaagtggtcctggatggttcagtaggctcaagcattgagggtccagagcatcctttgcccctggacatggaagggttttcattgggagatggcatttagggcatccttataaacgagcaggagtaaacctagcaataaaaaccaaacctctgccttcagaggtatatgctattacttctgcttaaaccgttgtcagagctaacagttttggttagggatttttgtgggtccagggcacgcccagacacccagatgcttctctatgtttgtaagatggcgagtgttgagatgtcttataggcttatattgagtgaaaaggaataggatcctttgtcagtagtaacttaggctttttaggtggccagggcaagagaacaccccccctacacacacacacacacacacacacacacacccctacacccacacacacccacccctacacccacacacacccacccctacacccacacaccttcccacacaaacctacacccacacaccttcccacacagacctacacccacacaccaggatttgaaggctctgctaagaggctacaacaactgtagcatacaactagcacacttgttgctattatgtgtaggggactagatggaaagagtgcagataggactacctaccattcacccctaccagcgaagtggaagcactcatcttctttcccttcttaccctttcaaagcaagttgttgagggatgaagaggagagtgactttaatcgtggctttaagtagagattttctttaggagtaattgtttctctcgacagagtggataggcttccatagttgtcttaataccttttgtccaccccaaggattgacccaggcaaggaggatgaaccctcctcaatttgggaaagttaaattttaggcacagcaggtcaaagagtagggaagagctgcagttgttggaaccaagtgacattgatttagtctggaaaggagtcacagaggaatcaaaagccagaccctcctggcagctttagatgtggttggggtctgggaataatgctggtcccaaaatcacctctggaactaactcctgtaaaatgaagcctctgcatccttcagtaacttacttaaaattttgttagggctgcattttcttcaaagccaagttctgaataagaagtatttgttttgggctctagccagattactgaagtattgttgagggagatttgctgtggaaggtgttgggggtacagggattgtgaagataatgtaaaatatttaacattttaaaaattttcagtaagttctctttccccaatgtcagcatgacttcttcattcatgttcttccatcactctccattcagttagaatctcaattgtgtaatatcagtggtagcgacaattatgaaattcgtccagtgaggaaaatccgcagagctagagcccaaaccagcaactttgtagtgaggatgaccccactggccggggagaaactgaactgatttttttttttctctctctctcagctttttattttgaaataattttagacttacaaaaaagttgaaaaagcatccaggcatggtggcttatacctataatcccagtgctctgggaaaccaagacaaatctcttaaagccaggagtttgagaccaagctgtgagactatctctacaaaaaaaaagaaattaagtagccagcagtggtggcacgtggctgtagtctcagctacttgggaggctgaggtgggaggatcgcatgagccaggagttccaggctgcagtgaactatgatcatgccactgcacaacagtcttggagacagattaagaccctgtctctttaaaaaaaaaaaaaaaaaaagtttgtaaaatatcacccagttttccctaacgttagcattttacataatctatacaccaattctcacagccaagaaattaacaatgacacaatactgttaaccatggactatttgaatttcaccagttttcccactaatatcctttttcagtcccaacatccttcattgtgtttacttactatatctagtcttctccagtctgtaaaaatgtgtctatctttgcttgtttttcatgaccttgatatttttgaatagtatggacaggttgttgcatagaatgctccaaattggttctaatgtttctcatcattaaactcatttttatacattttggggaagactactacaagattgacattgcatctcagtgcgtcacatctgtgtgatgtcagcatcttaccactgatgatctcttagccttgaacacttgattgaggtggtgcctgccaggtttctccagtgtaaattttctgcttttcgcattgttactgatatcttagggctgatactcacagtatgcagatgtctcgtttctcttttttcatatttcttttcttttttctttttttgagacagtcttgctctgttgcccaggcaggggagtgcagcctcagacttctgggtttgagcaatcctcccatctcagtttcccaagtagctagtgtgcaccatcactaattagtgccccaccagttttgtttgtttgtttttttgtttgggcagaatctcgctcagtcgccagactggagtgcagtggcgcaatctcggctcactgcaacctccaactccctggttcaagcagttctcctgcctcagcctcctcccaagtagctgggattacaggcaggcaccaccacacccagctaatttttgtatttttagtagagacggggtttcacatgttggccaggttggtcttgatctcctgaccgcccacctcggcctcccagagtgctgggattacaggcatgagctaccatgcctggccttcaccaatttttaaattttttgtagaaactcactatgttgcccagtctggtctcgaactcctggcctcccacctcagcctcccaaccacaactggccaaggtcctgtttctcatcacattgtcactcactgatcttgtcatgctttggtggagcttatctacaataattattactgccatgctttaatggcaattttctatcttattgtcatttattcattggaatttttacataggaaagacctgctccttctcaaactctaaacagtttcattcaccatacttttctccaggtaactttctgggtggctgaaagtgactttcaaagaatggagatatcttttcaatgttgagagagtggcagtctgctggttcccaagatgccttcttcacctagcattgagactctgcagaatgccttgaccacagttgtgatttggatctgttggcttgcaaagcccatttgagaatttacaaaatcattttcacggcctgagagtcttttaggtactgatttttttcatcccttctttactaacagactttatttagtagagtattattggacaggtttggggttcacctttatgagaaaaaacttagattttctaatttcagcttttttattttcttccatcagtgggacaaagttgacatcattgcctaaaagtaatttctgtgattatctgtgtatttcagttaaccatgttctttggactcactgtggtcttcagcagggatggtggccaaactatgtttagaaagataaaaattaaaatgacatctgcatccttcatgtaaacccataaaaaatagcacgtgaccctgaagatcctctgcctctcattccaggcattacaattgaaaatgctatctgggatgttaaaaactaaaactattctaggacttagtggaatattgatagttagggaatgctgtttgctttcttgaattttgaacctgttattgagaaggtagatgcgcctgtttaccccaggaaggctcctctttgaagacagtgcccctggagcacatgaccttttcatgcccttgcctgtcaagacttttccagtactctaaggtcaaagggcgttgggccaggctgatctaatcagggtattaaccttgccccactcatcttgatttattcctagatcccagttcccagagcatccctttagagcctcagaaatggaacaaaagacagctgaaataagcccgtggccaaaaggcactctgagcatgagggaagtaagcaggcttccctgtcactgctgaggctctgtcatccagccccagctgtcctcttgtgatcactcagcagacccgggaaaaattcaagaatttgttttttagtgtcagtgggagacgtggggatcctgcttttgctgggagagcttcagttgtctgagtccccactcaaccccaggctcctgccaaggccaccaagggcaggagcactggaaggctgactatggagtgaagaggccactgggtttcacaaacagcactgtcagccaaagctgtagcttgttagccatccaaaagaatcttgcacctgctgccagtgagcttacacctagatgacagctggagctgacactcattcagcccttactctatgccaggtactattctaaacacttgccatatactcagttgtcccacagatacaactatttatccccactttagagacaaaaaattgaggcacagaaaggttaagtaatttggccaaggaagtgcagctagtaaatggcagacctggggtttgaaccgaaatcagtgtgactctagagtacctactcttagaccctactctctactgcctctcattagaagtctcccccacctccctaccaccaccatcaccacccaccctcccagccacatatatgctcacactgggtggttcagatggctagaagtggcagctcaaccttgtgtgcctcggacacgaaaatattaggttcagacaccactcagacttcacattttcattagttttgggtagaggaatgagaataaatattcagcgagacagccttttctaactgcaagattgcattcctcttctttctagatgcagtggcaagaacagtaccctggatggtggagctggtagtggtagatgagatagagcagtcccttgattctgctttgtccccattaatgacagatctgagggcatccagaaggaatctccacaagcccagcctccacagtggctgcttcctctacatggtagagtggtgctcacctccactcctccatagatgccaagtcatctgtggtatagatgtggatgtctttgttcaaatggtccttgagtctttgctcagatgatccttggttcttcatttcacctgggaaagaaaataatttgcctgttgtcattttatccataatattaagaaaacttaatggcacaatctaagctttttaccatgttatttatcatgggattacttttttcaggtgtcttctgaacacgcagttgtcccaccaaactttgacactgcccttgtgattaatttttgcctacattaatcactctcccttgttttaattgcacattacattcttttctgtccttcccggacatctttgctagcacagtgagtgcagggaggactgtcacggactctctcccctcttgaatgggggcattccagcagagtgtgttacatgagctcagagcacatgatgtgagagcctcgtgatgaaagatactgcaaaaacagtgcgcactgttatcaaacctgactgccttcacatcttgctttctgtggtgcaaaataaggtttttatagtgtcctgtttcttctgttatcatctaaaccaatggggaacggtgagtaagtagtaatcttcagaaaagaagaaaagacagggaggagaaagtgtactggaggcctgctttaccattaagttgttaagatggagtctcactctgtcaccccggctggagcgcagtagtgcagtcgtggctcactgcaacctccaactcctgggttcatgcagtcctcctgcctcagcctcccaagtggctggggactacaggtgtatgccaccacaactggctaattatttatagagatggggtctcattttgttgtccaggcggggtttttgttttttgttttgttttttttttttttttgaggtggagtcttgctctgtcaccgaggttggagtgcagtggtgcaatctcagctcactgcagcctctccctcccaggttccagcaattctcctgcctcaacctcccgagtagactagctgggattacagctgcgtgccaccacgcctggctaacttttgtatttttagtagagacggggtttcaccatgttggccaggctggtctcaaactcctgacctcaggtgatccgcccgcctcggcctcccaaagtgctgggattacaggcgtgagacactgcgcctggccgtccaggctggtcttgacttcctttcgcttgtagcctcccgaagtgctggaattacaggcgtgagccaccgcatctggtctctaagttttttttgaaagtgtgtgtgtatgtgttgaaaaacaatcttactgccatcatattgaagttacctagtgcatttcttcttcagggtacgaagaaaaaagaaaagtatgtcctgtggttgatagaaatcagtaaaatggagccctgtacgaggaagtgctgatgagactccaactaactccatggagatgagctacaaaaaaaaatactgattgggttcaaatccttggcctgccatttactggctgtgcttccttggtcaaattacttaacctctctatgcctcaatgttctcatctctaaagtatggaaaataattgcatctgtgtgaaaactgagttactatacgtaaagtttttagaatagtacctgacatacagtaagtgctgaataagtatcagctagagagagagagagttagtttccagcagcctgtttctgtttggggtcacatgtggtctctgtccacctggctttttaggcctctcttacctgttccctgtttatccttgcctgccccagggaggagtttgagttggtacatcctgactgggtactctgcctgtggttagcaaatactctgcatgttgagtgctttcaaaatacagaaacaaacaacttgtggaggcattggaaaagtgtgtttgagaaacaagcagcctcaccatgaatgggagtttgtttccctttctcgtctttctggtcatctgctgcacgggcaggaggagctgtgggttgcttttcttccttggaacatggagcaccactctcccctgtgctgatacacttacaaagaagttcacctactccttggaaagttctggaaaaggggcttctacactgttggcctctcgaggagaacggtttttgtttctgtcttcctggaaaagaggtgactgctggcatcatctttctagataaactccttgctatgatgccattagaagcagtgttcttttgtgttttgcttttgtttttccctgtagacaggaataacattttgactagaaacttccctgatgtaataacgaagatggcctccttagaaagttccagaacagaccccttcacctctgtccccagaagcagaagtaggtgatgcactttcttggcaagccacataactaccatttctctacaatcgaagctcaaaaatctgtgcttgtatacgttcattttttgtttttacttctttacttcctttgataagacagaaacttctgtattaaaactgatttaactctgaggggctaagtgaacaacaatctgttgtcctatagaggtcaaggcagtgctcacaacaggatcattgtgctgctgtagttcagtttaggggacggggaatgtttataaaaacaaagttttgaaatgaggacagggaaaggctttgtttacctggggctctagacttaaggtactcattttgcctgcagaataatgaaatgcagagttgtaattagaaaaggttgatgtaattgatgtgttaacaatttttgaggtttttctctttccactttaggacagtcatgcaattatttttctgaaccaaaatcagaaccatcagtcgaaggctaaaacaggcctggggaaacactgtcttttggcaaagaaagacaaagatccttgttctctaggccagtgtgcatatgtgtgtaatgctttaaagaacaattttgacaagaactcttaggatgcaacttgtagagtgatttttaaggagatgcagtaggatttgtgcaagtattctgctatgagcctaagattttcaacatggaaatctagccatgcagtgactcgttcactttggcagtgtctatcttagtctgggggtgagcgtttgtagaaaatatttagagactcaagtacactcatttgaatttttgctgttagcaaataaatggcaatatgtgtaacgtggtgaatgggatgtaaagctgtctttatattaccacggttagaatttaattttgaaagttgcaagtcaaactgcttcctcttgcgtcattaagttgtgcctcttgtttgctcaccggcatgtgtgtccttgtgtcattttggttgctgtgaaattgctcttaccattctttcatccttcaacctgctgtgctacaatcctaacatgctgtttttgttgaaaatgcattcactctttttggcatcttttttccccagaaagttagaatattgggaattcattggtattagtgaaattcccacctaatgcagcagtttttttctcttacctgcataatagacgcagaacaaattaactctaaacggattagagctgtcaactgacagatactgtgcgagatactgaggaagcctcagagatgataccaataaacaggacagggccttctggtcgtgtttctacttctcttattggtttgtcttagcaattttgaattgcactgaaaacgaaatttcataggtacacgatacagtagttagttttaaaagtttttaaaatattaaaaaattgaaagtatttaaaatatttttaaaatattttaaaatctgctgtgtgagatagataggagacctagcttttcttccttcttaccttgatccatagagaaagcaaccctgaaagaagaaaaactcacccatttgagctttcttttgtttccactgagcaatacggaagaaattcaccgctggttataggtcttcagtgctttcttcagagtgggattgttttttgtttcaccataagtagtagtctattaaattaacagttgctagagaagaagctgcatctatatatgcagttctcttcttgtcaagcagtatattttcacgatagcaatgaaaaaattccatcctcaccagccgctgaaacatagtaatactgcagaaattcctgtgaactatgcgtttgctgcttccttttgtttgtttgttttcagagcagatgggcttgtttgctttttgcttaaacattaatcaaaaatcaatttatggctatgtaagtggcattagataattctcattctgactacagtaaataatatctatttgttcatgttagataagtctgggcggcagtggaatgtaaaatagaattacatgagatatgacatatggctatgtgttttataaattaatgcttttatgcatgtgggaggagaagtaatttagcttactgacaaaaagaaaagcaaaggaaattccagagaaagaacaggataccaagtctaaataaatttggaagacaaagagaatatcatagtttagttcaatcttttaaacaaattgtcacaatttatacgttgggataagagaaccatgagaaaaggtatattctaagtcctgaacatctttctataccctgaagatgtttttatagctcttctgctgactccctgccaaaaaaactatttacggtttggggtagggggcgtgtcatgccatacagctaaatacacttttttcctaatctaggaggcatgtctacttacaaataaattgcttaaactagttaggcttgtgtaaatgtaactgacatttccttgagatcagaaaaagttttgctgattaactatatttgtgtgtgtgtgtgtgtgtgtgtatttagagagaaggagggattttataattattacaatttgatttgaaatgtctagagaaagtgagagattatggaaattaccataaatgctccctttttcatagatttagatctgttaattgcaagaaatctttttttaagtgaatcaatgggaactttttatttcttccctaagattcatttagccttgaaaaggccaaaagttgaatgaagcttctaaatgccaatctttccctccttctgttaaagagtatgcttcaactataattacatttgcattgtttaaaatattagtaattctacagccagacctctgagatagctgagaaaccaaaaagtgaagttcaaagacatcatcaggcaccctctccacacacaacataccaggcccaccaaggagtttacatgagtgtttttgccttgttagccgtggaacgacctgggcagtacccaaaacttagcaaactcttcttgtaccttgtattcagtagacggtcagtagcaccgagagtagggagaagagtaaatatgtttctaatactttattcaatgtatgttgttaacagtgtagacactctgactttccttgtgaattgcgcctcagtatttagttttcatttaccctggatcagatagggcatgataacctttgaggggctttgtgcatatgtaatttggaatctgagtcagtcgggctgtgtctctcccaacttcccttctcatattcttctctctcctcctcctcccctccctcctcctcgcctccctcctcctccccctccctcttcctcccctccctcctcctcctcccctccttccttctcctgccccctcctcctccctcctcctccttccttctcctcctccctcctcctccttcctcctccccctccttcctcctcctccccctcctctctcctcttctctcgtttctcttctctctcttctttctctcttctctctctaccattgctgtcagttgagatgggcctgtgcggcactttgtttgcagttgattggcaatcttctgttctactactgcatctgaatcatcacttgcttccaccagttctctgaatgtcttacctagtgatcctggtggggaaattacagtgattagtgttccaattcttgtttgcccataagtgtttcaaagtagtatttttaaaaactcttctaagacattctctcttctcatagtagatgcagtgaatcttaaaggtgccctaactaaaatttttgtgctataaaattggcagctttacaaaataaaaggttcgagatatgagcctgatcaaggctctgcatttgcaacaatatccttggtttgcctggccctgttatattttgctgttgtgatatgactcctgccagtgctatttccatttaacctttgtttttctaaaagacagtaataatttttcatttctagggagtctctgacatcagctaaaggaaagacacttttctttgactgtatatacatttctccccatttcattaatatcaaagttgctctttcaaatggcttataaaattttaaaattacaccagttgcataagcctgcataaaaagcagactcctacataagctgacaatgcatttgtaccgtggtgttgagcagttttaacatcctccgtgcctctgtgcttctgctagctactgctctgataaagttatcaaggtatcattggatgcattgaccaggatgaagacacaacagtatggccttattaaatttggaaataatgaacagacgagtagagaatttaggagcaatataggcaagcttaataggtctttactttggggcctgtaactccaactacatatggaagaatttaagtacaggaaaagttaagctcttttcccagtagttctgctgacaagttgggtgacttcgggatggttacctcttcatgataccacacggtgatggtaacagaggcactgtccagtctctggttcatgcacactggtcttctcaggggtccctgtataggtgacacagtggagaacagggcagtactgccagactcagggacccagttcatcgagaggggcagtgtttctcttatgctgccttaaaggcattggatgccttttggaaagccagtggacaactcctgcatccacccaagattaatgttaacagcttaaagaatcattgcaatcaagggaaattttgcaacactttgttgggatatttttaaataaatgtgtgaacaccttgttttaggcttgctgaaaatgacccaggaattccttgacccgggaatatagtgtatggctgccaattattatattccttcatcagacaaaggcggaacagttcactctttttcttttttttggacacaaattctcactccctcacccaggtcagagtgcagtagcatgatctcggctcactgcaacctctacctcctgggttcaagtgattctcatccctcagtttcccaagtagctgggatttcaggcacgtaccaccatgcctggctattatttgcatttttagtaaagacagggttttaccatgttggctaggctggtctcgaactcctgacctcaagtgatccttctgccttggactcccaaagtgctgggattaaggtatgagccaccttgcccggctaccggacagtccactctttacaggggggcgtcttggtataagtatggaaagctccgtagatgccgtgtcagtccataccctcaccaccttcttgaccctgtgccgataaactaagagatgtgggcagtgtaccatctggaaaggaaaaggctttggagccaggtagtcctgcctgcatttgaatctgctttctaccacttacttacatcaggttttccttgtctataaaatggaagtccttgtacccaccacctagaatggaagtgaggattaatccagaccaacgatgaagagtccagcatgcaggaaatgctcgtttataaccatggaagtttcgaggacttttgaaattcgatgacattaacctttgaggtgcattttagttggcttgtgtgatgaggcctttctacttctagttccagaatcgtctggatctacattatgtgggaatgtttattcccccctttactttcccaaaatttgctaaacattttcattgctatttgagttttttaggagacatactgagatgaagttagggatgtgaaaggtttactgaggataacaccaatgaaaggaagagaggaggaagatgatgggtgtggggagcggtttgaccaggactctgataggacagacactctgccagccctccgggagctcatttgcagagccccctgttagatggatataaccgggccctgggaccattgctgggctcagttactggccaggagctgcctaggaagagtgtgacctaggccaaaagttgaagtggaccctagaagagctagcagctggagggcatctgctagtgacactctggagctggacagcaagtcctttctgaaagaggatctgagctgagtatccctgtggtccagtatttcaagttggaacctctaggtttgaaaaatacatgttttgggtgagagtttgattattcttaaagggacatatctttcaaacatatggctgtggaagaggaaacttgtttttgacttgtaaaataccagcagagccttgcagtgatcacaacttatgtgaaatacagaccatcacccacagtttacgtgttcacactaaagtgccagtctctctatgggttttagagctgatttagatacatgcattgctaatacagtcagcccagccaagatagtgccatcctccgcaagcatccactaaggcatggagtcagcttccgtcattgttagatcagtacttgtttctttcccttgcttatttttcctaacctctctgaacctgctgtgttggaagcttaaggaacatcatcctctgttgggcagaattcttccatggccaccccagcattatgccccacaccatttgacttactcatttgtgaatgccaactcagaatgtattgctttgattcttgattaggatctcaacctctatttattgttaagactatcaccctttgattcccccccatcccattgtgtccttctaaaggcacagaatagaacatcttctgccagaaataacatacaaatttatcatcatacaactgtacaatatgcaaataacttgctagatgatattactgaagattctacatccaattaaaataaaaagagaaaacaccttaagataaccatactattaaaagatacagaagacaactggaataaatggaaagacataccacatttattagacaggaataatcatcattagcaagatggcaagatgtcagttctccgtaagtttttcaatttaatataaatccaaatacaacagatttttttcttttagttagattctgaggttatcattaaaacaaaaacaaacaaacaaaaaactgaacaagagcaaggagtccttaccaggtattaaaaacttccatagtgcctaaataattaaaatagtgagataccaatagatgaagagacagaccaatggaacagaatagaaagtccaaatgtagatgcaagtacctgtggaaatttagttattcgataaaggtagcttcacaaatcattgggactaagataaactcttgatttactggattggggcatgtaaattatggcccaatcatgccatgtttcttttctctggaaaagaaagtaaattaggttcatacattataccatgtaccaggctagactccaagtgaatccaaggtaaaagtgtaaacaaaactatgaaagtcctggaagaacacatagcgagttcctttttataaccttggagcagagaaagcctttctagtttcaactcaaaatccagaagccagaaaagaaaacattcataaaaattgaatttaaattacaaaaaaactttctgcatggccaaaaaccataagcaaagacagatgccaaactgagaaaaatatctgaaacttctatcacaaagagctaatctcccttgtttaaaaaaacaaagtaaaacagagctcctagaaattgttaaggaagaggctaacagttcaataggatttgggatgaagtattgaacagatagctcacagaagaagaaacacaaatagctaagcatagaaaaaaagtttgatttcactcatacgagaaatgcaaattaaaactacaccaagataccattttttcacttctcatattggaaaaaatccaaaatatttgataacacactctttggaaaacaaccccacatggctgggaggacggcagaatagcacatctatagaggagaatttggcaatatctctcaggttataaacacgtattctttgacccaccaatcttagagggggcatttaccccatagacttgcacacatgtgaaatgacagttgtgcagttgttcattgtagtgtttcaaatggcaaaagatgaaaatgtcccccaaattccatcactgagggaataagtaagttagggtgatagctcccaagcttattttctcttcagaatcacctcatgaagaaaatgaaggtctgtgtgatagtagctggcaggtgggcatggtggtgagggtggtgtttgagcggagacctgaatgaaggttgagaaggagccagccactcacagacacagaggaggccttcaggctgagagagcagagaaggaccctgtggcagagacaagctggaaacagcactgcttccatggtctggagactggaatatgtgggttctgcagacacctggggggggcaccacctggtaaatctgcctttcagctcttggttcttccagcaaaccatgccagctgtggctctgtagccatgtcctcggaagatggcagaggttgcaacgaggcctctctgaggtgctctgggagcacagaggagtcaggtggaacttgtggcatgttgccaagggaagaagtgatttttagacagaataggaatttgccaagaagagaagtcagaaaagcataactggcagaggaagcagcatacgttacaagtaactgcatgtgtacagggaatcactgagtgatggacaagggcttggcacttggtgggggggggtaccatgttaacatgttagcaagaaactaggtaggggtacttgacttgggggcagcagaagcaggtgtgagtgttggacaagacgagaactgagtgctgcaaatgtttggcaagacttgattgagtgcatattgtggacctgtgtctccactggagacacaaattagaatataacaccttgccctggtatgctcagggtctactgaggtggagaaacctgcaagtagagtcggagtacagtgttgaaaacaccatctgcaaccttaacacagtgctaccaaaaccgatttcggagcactcctgcaggaagtgggctggccagggcaagggaagccgtggagaacagtggcctctcccgggcaggcagggtaaggcctagaaagaataagctgagtgaaggtttgtgtgtggcccatccagggacctgcgacaggaacacagcggctgaggaacggatgcttggagaggagggggtgctttacatgccaggcgggcagggccggggtggggccagatgctggaggagagggctggccaaggggtggcagagaggccccccaggtggcaagtttgcaccctgttgcttcctgcaaggagcttttgtttacgttttcagcttggacagtctggctgtctggccaagagtgacaacgtgacttaccatcagagcgaagcaccaaagagcacataaatgaagtggagatccctcctgtgtccagcctccccctccccgtggccttctcctaccttcccagtcctccatcagtaccccggggccttgccagaatctcagaaagaatctctggactctggctcaggacctctgaggtgattatgcatctagaggcatccccaggtgctgcccaatttggggaagcagcacttcccgctggaagctgggaagtttcccctggctgggggtcctgtgaggatggagaggccagaatgaggaatgggttgtgagtcaagaccaaccagaaggggacttagcaatgtcagatgatagcctgggtgaactacatcctgtgtggaaaaggcaaggtgtaactgcttatttcttgtcaagtgagcctaatatcatcatgtttctttttatgcctgctcccaaactcagcccctcccagtgagatcacagctccaggaacttgcaaggaaagggactaacggggcatctgattcacccgtgtgcccttaatggcgtattgtgtgaataaagcaacaatttttagtacagggatttaaaacaacttctgcaaagacagaactaaaaattaatcttaaaaggtggagggttggggtggagggcaggaaagaggaggaactaaattgccattctctttggagactttctaaaacctaagacgaagaagaggagccgaattatggaaacaaaacctttgcggttttccacagaacaaaaatgatgtgaagctgcaagtcagcagttctggcgcaggggctccgggggacgcccgctccgccggctgtggtgtgcgcccttcctgctctcccctccgaggggctgaggctccttttgtctggcgcgcgcgccccaccccgccccgggcgagggaagagggagcgggcaccccgcgcccgcgccgccgccgtggaccaaggttgtttactactttccactccgaataacacgccaatcaccagggcccaccctccccgccggccaatcgctgcgttgggaaattccacctttccgcggggcccgggcagcgactggctggagtgtctgtcagtcaagtgggcatcccgcaaggatgcagcaggagtattagggaggcgatcaccagagcagaggaggagtaaccttccccataaacaagatgtgttccccccactaagaaagcgggtggagggtggaggagccaaaacacatcccagccccggggccccaccggagcgaagcgggccgagcgcagagtgcagagtcggggaatccctccctccgcctcccgccgtcgctgcagttgtaaacacgtttccctccatgtctgttttcccttctctctcaccgtggccattacgggctgctgtttacaaaaatcctgcaggcctttgacaccccgtcctcccttcccccggcatccctgcccttattctggctttcttctcttccatctcctggtgagcacagcatactgttctcaggcttgttttccttttattgctctccatgtgggacaggtcatgctttatcaacatgtaccattttctacaaatgccgcccttcctctttaaattgcttggatgggcagatcgattttgattagcaacactgcagcagaaacaaggtgcatctctggaaggactgggtggttttctcgttattgttgctggtttgggtcacatcggatgctattttaaattctgtgttttattccacgatgggtcttgaatcctttccctattcctaggtttgaaatatgtttcctccctttaaaaaaaagaaggggggcagtattgtgttgaaccaaatgtttttctaccttctcctgtgatctgaatcaggtttcccatttccagcagtacaatgtggttgtattcagtgtgataggggcgtagtggacatgaattatttgcgacagggctgcctggaagatgcggagcggagtttgcgtggcccggagcagctccagtgtctgaggcttctctgtgtcacaggctccaagcaggaagcgcaggcaaaatggcaaaatacagcatgtggcattcagttcaaaaatgcccttttttagaagtcggtattctaaatgacatccagtcttgcttagttttttaagagaaaggaaaaataatctatgaagatggtttggaatattttgtgaaaagccttttcagcataaaaaagatgatcttgagggtctggtttgcggagtggaggataagcctccctcctgcgattctgaattgctttttggtttgtaggaatttcaggaacatgttgcaaagccgtggccgcttgaaagggtcggtgccctgcgccccgtctcagcccctgcggcccctgaactttttcagtgatggggcacttggggagaagtgcggggagtggaggaggaggggaaggtgcattgcaaatagaaatgtaaggcgtggcctgggtggccaggatgtgccagagcagcctccagacctacttaaatcccaggaaaagtcctgcctcaagttaggcacaacatctgacttggatttctctctgtttttttctcttccagttgtctgtctgtgcgccctctcccacaaggaatagttttccacactgatggaattaatgcatatcgtggtattattggtggaatatgtttaacctttgtttcgtgatttgagaggaatggttcttgtgtatcgtgtggtgacagcaggttaaggagagtgtcagagctggtgcagagttttgccccggggccatgaggttctgggcatcatgactctcttatgaagttacaaaactgggcaagtgattgaaggcagaaagacactgtaataaagtgtgctccagtgatgtgtgctccggcttctctcccttactcatctgggccaggtgctttcgccacagtgagcctgggtgtcccctgcctgagatgagcacagtgatgtctatgcgaggttgtaggactcagtgaagtgccttagggattttgcctggcactctcctgggctcatgaggtgcctagggctgagacttccccttctctgtctggtaaatcatctctcccattctttcttctgcggcccttcatatgagctttgtaatttactcagggtggcagggtgaattcatcttttgctgggtttctgcatcacctgctcctttctggccaggtcagcctgttcattttttccatgccaacagcctctaagtgccagtaagtcacgtctgaacaaccaaagcatgtttccctgcgggagaatgccagggcaggcgggtctgggagccaagaggatttctcctgttcagataagtcgggggaatagaagagccctgtgacttgagacaagctttgagtgacacccagtgaatctcccatcactactttaatccctgccccagtgttctggttccccctttcctgcatgaggcagtacgagtaccctggcctggctttgggttctacacggtctgactttagcctgccttggtctttgttcccctctcactccctccacccctgccccccccaacacatgtggagtaccttaccctgccttcctagttctggaatggctgcccctgtgccaggccaccccattttctagaaccaccttcatacagcccctgcgcatcccactgtactatttccttgtttgtttttcctgtcaatcttgccttccgcgctaatgggacactgatgctgtatggtgatgtgttctcccacagtcatcttttcctcctgtggttggggtggggagctttctctgtgtccccccatgagagtgaggacagtctcatttaatggcaccatggtctgtggagccaggcaggcctgtgtgtctgactccacttcagcgctctcagccagcgtgggcacctcggacccagacagacgccccgagcctgtctttctggagaaggaagtagtaataccttttccttgagggagttatgaggattaactgtgcctggccctgaattcgtgccttgcaggtacttaggaagtgagttattacaagcagtgctttttatcatccatagatggagatgttatctatgctataggactgcagaaagaattacagagaattatgtagaatcactagggacttgattaatatttgtttacctttcccccacatggattgatgtcctttattatacttttgtacccccgcttggcaagcccttgacaaatattgatccaacaaaaaattagctctttaatgtatacgtttagaacctgttgctttgtcagtagtggtttttatgaaaatgaatgcttataggtcagacttctggaaaccctaatctgagggaattgggccaaataggaaagtgagccccttaaaggcagttgtctgaccagtacttggagcacaacaggttcttgctaaagcactgtgtttttaaaacagtggagttattaggttgaaattctgaatagcaagaaaaagaataatggaagtgctgccagccccgtgatgctggtgcagctggtcagtttgcagaaggaggccagttactagagcagagtggccgtagaggctgcaacacggtggccaaagcatgaagctgctgtatagtggcaaggtcacagtgatttccccgcagcctcggtttagagggagacggggtgtgctgagctgtgcctgcttctgtagaaggggccttctccaagtctgagtagccttaagccattaggactgctgagtctttctccacaaaaatatgtgggaggcctgcagggcaggtgctcaactaagctctggggctgcaaagatccagagccatgcccctccttggaggcaggtccttgtagacgaggacaatcgtagccttcctgattaaagcaggaattgtccaatcaggctatatgacgggcatcgtccatagtcttcaccaggggagcttttctgactatacatctctagccctgtggcttgagccagtcacttaatttcccctgagctttggtttcctcctcctggtagcagagagactatcagagtgaggggcagatgcaatagcatatgtaaaacacttagcgttgggcctggtgtttaactgcaataaatgttagctcatattttactgtgacatagatgctgtatgccttttgctgagtattaaagatactgagctgtagcatgcatacttgcatgaatcagtctgctaagttattttaagtttgcatttgaaaataaagggtggattgctatccaaatataaagaattggaaccaggctctaaaaggatgtttgctgttctttagcaaaataccattcttcttaagtttcattcaatcattccacaaaaatttaagcatctgttttgtcccaggcaggcactgtgcttgtaatggatgtgcaatagcaaacagaacacttgctttcagctcacacagagctgactcctgggcagagaatttcgacagtaaagaaatacaagtgtgatgaaggagaaaccctttggtactacctgctacatgttttaatatttaaatgttgacttagggaggtctttccatctaaaaataatgatttgccctttctcctgtaaatgacccctttctcttaagttttgggtgagagattttttttttttaaggaagaaagatattctacaatcgaatgtacaactgagataatgcttaggagagaatgtatactgggtttgtgccttggaagttgcttaggggaaacagttgtgtgcagttggaaagctgatgctttaaagaagcttctataaagtgaccccacaattaaactgttttgtgtacatctttatttatttatttatttattttttaattgagacagagtctcaccctttcgcccaagctggagtgcagtggtgcgatctcggctcattgcaacctccacctcccaggttcgagcaattcttctgcctcagcttcctgagtatctgagattacaggcatgtgccaccacacccggctaatttttgtattttcagtagagacggggttttgccatgttggccgggctggtcttgaactcctgacctcaagtgatccacccacctcggctttccaaagtgctgggattacaggcgtgagccaccacgcccagcctacgtctttaaaaataaatgtaaatacccaaggctcacagttccgttcttccatctagtctagcaccgtccagtggaagtttccaccatgatggactgttctgtggatgccctgtccagtacaggagccgctagccacatgtggctatggagcacttgaaatgtggctagtgctacggaggaactggattttggatttttttaaagttttaatttaaatttgaatagctacatgtggctaatggctactggacatcacagatctaacacaggattaactgacaaaattctttcctcttaaaaatatgtgtttattttgataaggataactgagacctgtacattccatttttcctgtcatatttagggctcataaagggggtggtatgcacgttttaaaaaatgcaacacaaccagttaaaccagctgtctaattgtacacatttcctggagctgttggtgttgattattagcaaatactaagtacttgtaatgacctaagaactataagacaagcaagtcgtcttctgtaactgagtatcagcggattcaagcgttaaggaaaatgattaagagaaaacaaccaaaaaagtcttaatggttctgtcaatcaagtggctatcaattcatggctattcaaaagcttttgtggctatgaaaataaactagattgaaaaaattctaaaacaaaattgaaacactcatttgagtttaaaattttagttgagttgatttttatttcttgttttggttcatttgtagtttccccccgcttcgttgtttcctcagatatggagaataaagcctggctggtcagtttcagtttttatttaaattcattttgtcttcattccttttaatctagcacagtcctgtgatgtattgggatcacagtgctctggggaaacattgaaatataaaaacattttcctgaaaacatttccagttatatttaattttcctccttgaatagaaaaatatttccaacttaatcctccctctcccctcttgaaatgaattgcatgctttggaaataacatcaatccacccaagtacacaaggacaatctcagccatttaatcgagatataaaggcttagagaactctgggcttcggaggcacagactccacctttcaggatgctaataaacgtggacgaggtctcgcctgggcttcctcctccattgttcagcgcagcaaaccagcacagcactccgtggccagggtttgcggggagaaatctctcactctgttttagtagcatcatcatccttatcagcaccctgcttttatttttgaacagccaaacttcctctttccaaacttcgtgtgacatctgggaccagctatgtttgaaggagtctgaacatgccacatagtggctcacgcttttaagggaggaaggccagtaagcctcctcaatggcagaattctactttcagtctaccctttggttctgttgtggttgttccttagaactttattctgctcattaggaagcccagcctccggggagggtttagcttctcatctaagcaagaagtaaaatgtcataatggaggaaaaaaaaaaaaaagtccaaactttttttggacttttagaaacacatccagtttgagctccactgagctatcattgcagttacaaagcccatgtatattgagatcggtgtaaaaattcagcatgtccacctgcataattatgaccagtgtattgaaagcacatttcatttagttttgcaacagccgatgaggtagattctaccaacattgttttacggaagaacaaatggaagcctggaaaaataaattgtctacctcacacacttcgcaggtggtaaacacaggatttgaactaagacatacttgattttaaagtgtttgcttttcctttgcactactgcatctgcgatgtttgcactcagacactctagaatatttggtgttgcatgtttttgccccaagaaagaacccattaaaatgaaactttccagttcgtaagctttgccctcaagaagggaaagaacttcttgcaaggtttctgaaacaaaaagaaaatgaaaagtaactttactgtatctgggttttctgattaaattacggtttttgcaagcttgtgcatttctcagtgtccagatagccaggatttttccttttaataaatatcactttaaaaaacaaacacacacattcttaaatgcatgattaactgtatagattgatttagttataagatgtcctagcctaaatataagaaggtgtatgtgttagaattaatttcttcaataaagagaaagaaattcaggaattgtggttctgttggtcttctgtactgtatatttttgtgcagccaaagcagcatgccttgcttcttggtttcatgaccacatgggtagtttcttgaagttttttcttttgagatggagtcttgctctgtcacccaggctggagtgcagtgacgcgatctcggctcactgcaaccttcacctcccgggttcaagcaattctcctgcctcagcctcccgagtagctggaattacaggcatgtgccaccatacctggctaatttttgtatttttagtagagacggggtttcgccatgttggccaggctggagtttcttgaagtattgactgatccttgactctgaactgtatgatcaaagacttttgaaatggcacaccgtttcttaacatttaggccaatttcagttgctcatatccaaaaataagtcatgattttcggagtcagtgcgcagcacttagtacaacaatccaaacccttgtacagaccatcctagtagaaatgtggatcttgagtatctcagcttcttagtagattttgaactccgtgaaagcaggagccaggcctctcacagcaagtctctccaatatgctcagtaaatatttgtcagatcgagcaatgaccagatgatgaaatacattaaagccttagggagaactgagactactgcaccagtttttgtgcactatcatgctggaaatctttccaacatgtattctgtacttctttgcttcttactccagtgaatataatttagtcatttctggccaacttgaggacatcagcgagcataaattgttgtattatgcataatacagtgataccctcaaggctgagtgggaggcagtttgccctctgctgaaggtttcttgtgcttattgtgttcttatggtttggttttaccatttttatgtctccatttctgtttaatagacttatttcagtaagaagagaaagccgtctccatcagcccctctgtaggtgattatttgccacttcctttttgctgtgagtgctttgaaaacagatttctaagcttgttagagttatgtgttaagagtaaataggcagtaagtgaaaccaagcttcttcctggtgcttgactaccccagaaatgtttatttgctgaatagttgagttctggaaaggtgaggtataaatgtgtgataaatttattcctttgcatgatttttttttctttttcttccctccctccctccctccatctatgtctctgtctttctctgaacatctctccgtctcagtctgtctctctcatgatagttgctggaataatttaaatgaatgtaactcatttacccacatcgaagcccaactcagtagtgaaaaaacaaatcttccaaatgaatgcactttccccttgatgtgctatatacaagaccttggcacacctagttcaatgacatagtattttagaagggcctccttacaccttcctctcagataaatatacatgcagggacattctgaagaagtttgttatcggtcttctcccctcctactattagctccgccctcctagtccttctctttcaccatgctgacccgcgtagggaggacccttacaccctctgcatgcagcgctggtgctccttagtgttcataaccccaacctccatggcctctctcgcagttctcaggttaggccctgcttctaggggacattagctttccaccctctactacatacttcctagttgttgcagcctttgcaagcaaaacttgttttcatttgggagacagcatggtctgacagagcctagatcctggggtgaagacattctgggtttgtatcccgtctttaccacctctgagcctctgatgctggacaagtcagcaagtctttgcaccttagtctcctttctgtaaaaaggagcttatggggatgtaatcagagaagccttagcatggctcttggtacaaggcacggaccaaatccatggtacgctcactcctttcctttcagtaatactgcctaaatagggcacatgtacctaaaaggattttgtacattccttgacagcagaattctcatcttctgttgcatatcccataatgctgggaacacaaaataaaaatggtagcttttcacattcacttttggcctcaattttttgttattccccaatgaggatcatttcatttggggctggtctccggaaaaaagtagatcaagcttttcagatgagatttgggtgaaaccctgacaaactcttttttattgccttccctaccacatagtggtggatcaggaaactgtagggcttatgatgctgggaaatttctgctaatgcaataaagatttttgctgttgaaagaatttgatctgttttatgtataacatgcagagagcagaagcatatattatctgtagcagatgatagagcagggtatatgggcaagttagaaaaacacagttctcactacatttgaagaaaaaggacaaggagttgtcacaaggatccaggagagtcgcacataattttctgtcgtgcattttgttgactgttcctctttgcatccttcaaccatcttaacttcccacttgcacctcgctggaagacaaatctaagctaaattaaatgctaggcaatatgtcagaatggaaagggccctcaacttgggatgcccggttctctaccagcctgaataaactccagcaacagtatttctctaggaatcatctgtaaaaagtagaggtttgtcatatctctaaactagggattcaccttatttattaagctatcagtgactttatcttgaggtgcacggcttttagtaactctggttcaagtgcaaggaatgcaaagttaagtgtatcattggaggtgggatttttgagtttgtcagtcatttattgatttgcatgtatccttatagttcaaaggtctttttctcaacttagttgatgatcatgctgtaagttgttttcttttgctttatcaacttttaaaaacgtttattaacttttaaatttgaaataatttcagacttgcataaaggttacaaagagtaccaggagttctggaacaccctccacccagcttccacagatgttaacatcttacataaccgtaatacggttatcaaaacagtgttcactccatactccagtgctgttaatctccagactgaattcggatttcactattttcccactgatgtccctttttttggttccagatccaagagacgatcctacctggcatttattgtgttcagtttttctaattctgggacgttttcctgggttttctttagtcattcacgaagttcgcacttttggagaacatggggccagttattttgtagaatatctttctgttagagtttgtggatgtttcctcctgattaaatttggggggtacatttttaacttggagatcacagaggtgctgctgtttgtgtctttgcgcatcctgtcaggagatgcgtgatgtttcctttcctggtgctgttagctttgatcccttagttaaggtggtctctgtggcttcctccattatcattactatttttctctttgtaattaggaagaatcttttggaggtagatacttgagactatctaaacaagcattctgttcctcattattctttcacccactaattttaacatccattactgtgatgtttgccaaatggtgattttctatttctgttttctacacttagtaattggattctactctcaggattttatgtattttttaacagtgagggacataaactttttaactagcagtggcaagtccacttttatttgggaggacaattactagtcacatgaagaagaaaaaatatgcagaagcttaagaaatcccacatatgaatgttatttgaaatgttcttgccctttctccctacaaaggaggtgaagaagatgacaggagatgttaattgccaaaatagtctcatagttttggtcctggctgcaaatctctcgtttttgatactcaagagaatgctattggggaactgactctgaagcacagcccagatgcttgagatgggttgggaaggtttacatcaacaccatgaatttaatttatcatgtgacattttatttctgagtttttaaagctgtaattaaaagaagtgttcaaagtgttgctttcctcttttagaataaacgtggctgggtgtggtgcctcatgcctgttatcccagcactttgggaggccataggcaagaggattgcttgagccaggagtttgggaccagcttgggcaacatagggaaaccacatcactacaaaaaaaaaaattagcctgtcatggtagcatgcacctgtggtcccacttacttgggaggctgaggtgggaggatcacctgagttcaggaggtcaaagctgcagtgaggtgtgatcatgcccctgctctccagcctggacaacagagcaagacactgtctcaaataaataggcaaacattaccaacatggcaaacaagttggaggaggccccctatttaattaaatttcagcagtcccaaatctaattggtatgaagaaatcattattcagaattttccatcactgaaatactaaaatcacttgttgtttgagacatcttggcctgtcacccaggctggagtgcagtgttgctctcatagctcactggagcaggagcctcaacctcccaggtttaagttaatgctcccacctcagcctcctgagtaactgccactacaggcgtgtgccaccatgcccagctaattttttaatttttcgtagagatggggtctgtgttgcccaggtccctcttgaactcctggcctcaagctatcttctccagtcggcctcccaaagggctgtgattacaggcgggagccacagcgctcagcctaaaaataactctttagccaaaagaaagttttaaaaaattgtctgttgtattctttgattttactctatgtggtcttttctattatttttaaaataaaaaagatttatactcctcaagtgtaacattttatcaaatctcatgcttctgtttgatgaaaccgaatggctaaattttttaaatatcatgcaatccatcccagtttgtaattttattatggccctcacacaagagcgtgcaagctatactaagcttcctgtggccctcgtttttcctcactgatatttgtaactcattccaaattaaattttaggagtctgaaatgtagctgttatatttgggagatgtgaagaaaagaatcgtaggcatctcagtaggctaggtatcagatcacacatgcttgctggaccaaagaggactccttacagtaggatacatgattctgagttagtttgtgtactaagtatatactatatagcttttgaaggggagacgggcacagaattcacaatatcatgcactaagggttattttgtgtttgcagtttccagatgaatgttttaaagttggctgcagaatacagcgagataggtaaaatctatttgagtattacttacagaccccaaaggatatcccaaaggatatgttggactaattcctaaaatatcctgtaagtcattgcaggtacaggcgtggatctgggtttggaaacgccgcctggatcgctggctgggctcctgcagccgccaaggaggggctggctggaggtggggctcggcgtgcatagcggccacgtgactgcgccccggccacgcccaccgtccctcacgtggtcccaggccacgctgggcttcggcatgtgctaaagtggatagaaaagggagtggggcccgggcgtggctttgtggtttgggaagatatgaactccttggggtttttttctcttttaattctttaattttgatatttggaaatgcgtaaaaggtttttcatttgtccttgaccacgtggtccaaacctcaatttccctagcagaacgcggtttcgatcactggtggatccgtctcacagcaccagtcatgctgcctcgctgggaagtggagggctcaggattcccgtggttcacgatccattttatgttggaaggaaatcattttgaactatctcagtacacaccctagtgtatctttaaacctaattgagtgttgatggaaaatctgcggtccgagaaccgtaagaaaagggggctcccacctcccgctctggggtcgccacttgcctcgcaggcaggaggaggctcccagagtagatacaacttgcccgtcacccggatgggttggtagtgcacatatgcacggggcgcagtttaaaatgaaagtaaaagatgcaaatgtgtttgcaaaagaaaaattaacataggatacgtgcgggcgttctcagttgaactcggtcttactgttccacgcgagcaccccatgactcagagcccaaatctcagcggaacagcccaggacgctcctgccgtccacaggaagacgcctctgtctctgtcccccgccgccaccacacagatgcacgtactctcttcacttccgtgtacccagtaaatgcagatcctgatttaaatctgcagcatgctgctttcttcccattgcatgtgggaagcttcaggttctcttcggtttattttctcatcacctttattaaaatgcagtaaagcaaggagtatattaatgcgggcctctgcaaatagagggaatttattgaaaagcagaatggcttgaaagattgaacttcatcttaaaaatcagaaacagactcttgttattaatagctttagaaacgaaaatctaacttctgataaattatttcagaggagtggttcaaacgtgtagtagatagctctgcctggtcatcaattatagtgacgtccttgcatcagctccagaaactcagaatattcatgagctttccagtctgactcagaccttcaggagccatgaaattttcctgttgggatgagaggaagcgctggcggtcgtttcggcagcttaatgaaaccagaaatagataagcacgagtgaggggtgatgtccgcttgtttgctcccatcatgttgtttttaatgtgtgaaagtgaaagttttaaaagtcatactaaatgtgtgatcctttttagaattcactgggtacgggtacgtggaggaagtgtttttgtttttgtgaatttgtttaaacaaatgactgaggctttgttttccactctgtctggccaagcaccattgctacacttttttaaattcatgacatcctgagcagtgaagctgttcttcagcccgcctctccatttgtgactggaagacaaggaggcagacaccaatggcgcctctcacaatggaggtttatttttttttaatctaacggagggattgtagatggtgtaaaacttccttgtgccaggagagaaagggggagagagagagagagagagagagagagagaaataacccattctaaacaactttaggaatagatgatccgtaggcatcaactttgcgcagcaacaaaagccactttctgaacctcgttctgtgaagttttaaaacaaattgggtttgtttaattaaaatatttcttaaaggcaaaaagcactgagctaatttttaagaattttaagttatatattaatatgagtagtgatttataattttctgttgaaatacataaattcgagaagccccacccctaccacttgccagtcttgagtccccacggctcctttgcctaggtctaaagtcactgcttgcacactcctgccttgcatatgccttgccatcgtgtgggcctcttggctggaagtgttcttgtcctcccgttaggtatcttttatgacgtgaatccttacctctaattattatctgtgtgtacatctcatcacctgcatctgactgtgtgccttgtgtatgtctcttagccctcacaattgcctgacatgccttacaaacgggtagaccaagtgttaaatgaacaaatatttaataagaacttaaaagctttttgactttatatatttttaaagccattgtgattaaacactatgtttgatgtggtgctaattctgtgctttatcaactgtgtgaattgtagtatttttaaagtaggaataattgagaaatattttgaagttaggttaagcatagcagtaaagtttccactttttaaaatagccaaatccaggccaggcgcagtggctcgtgtctccaatgtcagcactttgggaggccagggcgggcagatcgcttgaggtcgggagttcgagactagcctggccaacgtgacgaaaccccgtctctgctaaaaatacaaaaattagatggttgtggtggtgcatgcctgtaatcccagctactcagagaagtgtttgaacccgggagttgggggttgcagtgagttgagatttcaccactgcactccagctggggcaaaagaatgagtgaaactctgtctccaaaaaaaaatcagagcgtggtggtgcacacctgtagtcccagatacttgggaggctgagatggaggtcaaggcttcagtgagccatgatggcaccactgcactccagcctggacaacagagtaagaccttgtctccaaaaaaaaaaaaaaaaaaaaaaaagccaaatctgttgggtttttttttttgggggggggggtcctttagaatggccctgacagatctttaaggcatggaaatgagccttatgcaagctcctggcaatcagtatgtgagttctgtctccttggcaagatacagcctcttagaccctcagtctggggaaataatgctgatttctcctacgagttacgagaattacgctagaaaactctgtggcgcatacaggtgccctgtagcctgttggttagaagcactgaccctgaagtcaggtcgcccaggttggaattccagctctgccttcttcaagctgtgtgactctgggaagtcacacacactctctctttgtgcctcaggctctggttctgaagatgggaacggcaggccctccctctttggcttgttgcacagatgaaatctgacagcgtatgccaagcgcttagcacgggtagcagtgagtgccccgtaaatgttaggtaccttcctactactactaaacattcattcttcccttccctgctagtacctgcagctctgactcatctcacacccttgagagaggattatcttcattaaaaagtttttggtctgcccagaagcaagtgttacctgtgagagagctgggcttgtgcataggttagattatttctttgggttattcctggggaaacctgcaaagaaatgcagccagaggcctctggttcattttactgctcatctcctaaaagtggtttctcagatttttatcctttttttctctttttcgaggaaggggcaaggaaatattttttcatattattcttgtcatcgtctatttatttaataacagttgactgttgaaacataggaaagtacttatccgccaggaaactcccttctattattggacttacttgctttccatttatatgttgtctaattccaaagagatttcgagacagctttcaattaaaaaaaacaaacaacaacaacaacaaaaaaaaacaccacataccgcatgggtattacacaggacctgtatggtcaaattggcaacgaccacaccacatgagaaggaagattattcttcctggaacctggctcccttgagattcttttttttttttttttttagacggcgtttcgcccttgttgcccaggctggagtgcaatggcacgatctccggctcaccgcaacctccacctctcgggttcaagcgattctcctgcctcagcctcccgagtagctgggattacaggcatgtgccaccacactcggctaattttgtgtttttagtagagatggggtttctccatgttggtcagggtggtctcgaactcccatcctcaggtgatccacgcgcctcaccctcccaaagtgctgggattacaggcatgaaccaccgcactcccttgagattcttgtaagccaaggcagaagaagagacatcttaaagtctgtatgtgcacacctgcctccccccattttatatacaattcaagggctttgcttttggaaagtttgcctatgtagtcgtccagggctaaattaacacctgtctctatctgtgtgtaaggctctctgggaggagctgtgaggcaaataaaaataaggaatggtgtcccgcaaggagcttacaatgtgtgcattacaagtatatactgagcatggccctgggaacacagtgaaaaaacaggattcctgccctagtacagtgtacactagtggaagagagagaggcagtaaacctaaaagtaagtcttttaaaaactgtggtaaaatgcacataacataaaatttaccatccaaccgtttttatgtgtacagttcagtgacagtaagaacattcacattgttttgcagccgtgaccatcatttatattcagaactcttttcatctcgcacaactgaagttgtacctattaaacagtaactcctcattctctcttccacctaggccctggccaaaaacaaaaataagtctttgattgtaaacacgatcagtgctttgaaggagatgggaaggatgttatcataaaatgatggggctgcaggaatggcacctactcagagagggcggtcaggagagacctcttgggaatgatgacatccagcaggcaggtcattaaggcatctctaggcaggtccagagtgcaaggaggcataagccaggcaggtggaacagcgtgtgtgaaggcccagagtcaggaaatggtctgcttccttccaaggaaaagaaaacagccagtgtggttggagcaggggctaggagagaaaagatgtgcatgtgtgtgtgtgtttgtgtatccccatcatgatttagtactgtcagcgcttctgtgttctgaacctggagtacaggcagacacagccgcatcccagaagctcaagagtgcccataccaggaaattacagaaatctttgccaaatggatgaatgaatgcaacttccttgatacagggtcagagaggggaaatctgagaaaagcaggtgggcaatgtactcctgacatactcccttccgttgcaatggccttgagtgatggagcaagagtgaaggaatgttcccatggcactggcaccaggatgactttttgtgaagcagagcagttggtcttagatagtggaggtgcgggaggcatgagaactgggcagtctgacggctgcaccagccagttggctgtcctttccacctccatgcccaggagctggcccagggcgcgcatgcacaaagccagtgctcttttcaatcagaaaacagcctgcgtatgttcttgcttgcaactcagatatccagcccactgatccaggaagagattcctttgacctgggaagtcataatggcagatatttagacccagctctcaagcaagcctccaagttgttccggtgaacccgtaactttgagtaacctctgattgaaccagagagtaggaactaggtgcagaaccttgttgaatagaattgtttagcatcgtccatttgttagagcatttcaggatgcctgtcctaaaatttggtatcataatggtatttacctctcactcacctccatctcagcccagtaattaataacaagggacttgcttcttcacctgtttctttattggttgtaggaagtcttttccttaccacagaggaaggagcttctggatccctttgctacgtccagagagttttcatctaatctgggtgtattagtccattttcacactgctgataaagacatactcaagactgggcaatttacaaaagaaagaagtttattggactcacagtttcatgtgactggagaggcctcaaaatcatggcggaaagtgaaaggtacatctcacatggcagcagccaagagaagaagagcttgtgcagggaaacttccattttaaaaaccatcagatcttgtgagacatattaactaataacagcaagggaaaaacccaccccatgattcagttagctcccggcgggtccctcccacaacatgtgggaattataggagctacaagatgagatttgggtggggacacagagccaaaccatatcactgtgtaaaagttgaataaagttatttaggagcacattgtattgggagtttgtttgtttgttgaagagccaagtaaagtcattggaagcatgggaaacttttttccctgtctaaaaggaactccttcctagtggaagttgaaagctttcttggcagcctcagcccccaccctacctccaccaccccagtgggtacctgcatcctgaagacccttcacaatagcatctgaactatactgggccttcaaatgatgtcttgggtaaacccatgtccaacctgcactaaatgaagattattttcgagcgaatggattgaagaacagtgctgaaaaactagaatttgtaatattttcatttgagcagaggtgaaatttgaaatattttagaatcttgtcttatgattttttttctttctttgccacatagccctcccctggaaattaaatctgtggattactagtatatgaactgatcagagacatggcttggggtctccccatttacccacttcccagcacgttataatccactggacacctccaaggatgagagaccagcgggtcataatgcgagactggacatctctcctaccccatgtacacttcagctgagcaggcagaattagcagagtcaggactagaagttcagtctagggatcaaataataatagtagctaatgtttaaagagtacctaagatccgccaggagacatactcagtatagttccgtggtttgccacatttcatcttataccagtagcacaggtgaaatttgtcttatgtgtatactgaggaaaacaagtccctctgatacacagcagccaataaatgacaaagctgggatagaaacttacttcattctaacccgagagtccctgttcttgcatgggcacagcctgccatccccatgctctgcctcctaagcagaggatgaacttaagcatcttaaaattttaaacattgactttccctaaaaccaattaaaaaaaaaaacaaaacagacagacagacatgacttgtgcccttaaaaatgcagccaggctggcatataaatgggcgtaggctgtttctaaattttttgctttaaattttgccagcatagcttctggactggtagttttgtttgctttttaatatatttttgacactgtgtacagaggaatgctacctcgcgtcatcatgtcctcctccctgaaggcaagccaaggatgtcaaggggccacttcaggggatgtgcaccctgaaggtaaagctgctccagtgggaggggttggggtaaatgacaatgttagcagctggtaaatttttttacatgggatatctcacaagacttattgatgcatgttatacgtaataacctgaggcacatcaacattttccactttttcctattctttctgtattttcactgatactttttttcaaaaaaatctccaataagtttaggatcagcttcaagatttctctttaggtaaatagatttgtatttttgatggccatcctagtccagtgtaaagatatggacaagaaaccccacataaaggaagcaagatcgctggctgctttctctaggtagcttgagttgtatactaatttgtagattatttctcttcatcgaaaaaacaaaacattctgcagagggcagtcatgtgtccgctgtgcctctgctcctgtgtgcaccataaaacttgaaagtgagccagaatttgaaaatatcggattgggatgtgatttctttaagcctctggctaatttaatataaagtgtttacacttcatttttctggcagtggattttctatgtaggtggtggaagatttcctgtaagttttgcaagttccagggcaaagagagttgcaatatgcaatatctttctgtggtcacaccaacagaaagggcgatttcttaacctgctgcagttaccatgtgtgtaggtggatgctggctattacagatggtatcctttcaaccctcaaaattgttgcaagttcacaggtatgttaatgaaaatgaataagtggcatttttaggaattccaaatactgagtcttggaagtagataatcttttccctaaatgtatgctccggtcagaactgctgcctaccacacctcgtgggtgaaacagatatttcgagcatgactgagcttattaagagccctgcggcgcttcctctgccgggggtttagaaatttcaaaggatgggggttgagggagggaggagttatgggcatgtgatgtggacagggcgggcaggaggatggaagtaacaggtccaaaatgtatctttggtggcccggcagagctcttgcatggggtgagaatggtaatttaggaagagcaagtcttcccatctgtgaagcagaagaaaaaagtggacttaaggagaagttcgggtgctgtttatttagataggagtaaggagagtgcagttggggaaaagcacttcagaggctttacttagactagcagaagtctgtttggcagggtgggaagcaagtgcagttgggagaaaaacgttttcaataggcagtttcagaattggaaattggaggagggcagtccatttcaacatttccaacagtattaaagaaaatttgcgggttgtttgtcaaaaggggtcatatgctttaaagattgagagatcttttcggtgaagtaggggagctggggacatcgtgatgtgacaagagccgtgggctcagaggctggggacctgggtgtttaacccaactcttgtgagtggtgtggctttcatagctttggttctctggtcttcactttatctgccaagtgaagacatttgactggatgtcgtgatcttgagttgctttcagctccagaattcgaagaccccttccattgggcattcatctaatttcaaagatgctccctggctccagctctgcagtgaagcagaacaaactgatacagcctagcttgggggtggggagtcggccctccttttcccctcccttcccaggtcctctgggtgattgggggaaactgagaagccgttctcttctccagagcactccatttaacaagcattgcagagcctggctcgtgctgcagtgaacaaatgctgacttcagcctttaccctgggtttcaggtcacactgattgtttgcaaaacatgttctttttttgtcacttgccagtacttgttctctgtgagtaaaacacaaacacatcctcagggatgttgcacaccagtttgcagcctgcagcttctgccctctggcctgcccaggtcctcggctccgggacgaggatgctccgggatttcgggagacagcagttgttttgacatgaatctcaaagttcctacaaagcttatttctttgaagaaggccaaaaaaaaaatgaaacattttcagatctttgttttcagattattcaagtccagaatgttggataagatttttgaagaagagatttatgcttgagattccttttagtttctttctttcttttcttttcttttcttttttttttttttttaggtgacttggccagtttgggtttttacggtgttcagggaaagggttaagaagttaatttgggaagtacagtcatgtgttgtacaagttgctgtctactgatcccttcattgagcaagtaaacttcacacattctcgtgtctgcaaagcatgtggatgcatgggcagttatgtgtatgaactttttttttttttgagaatggctttagtgttcagaccaaggatggaatgaaagatcacgtgtgctttccactgtagagctgccctgcttgttttgattttatagttattctaagtgttaagttccttcatctttcaaagcaaattcctttgatccctgaaaatcagctaatgtttgggaggcaattaaaagatgaggctgtggggttggggtgaaggcttccccagcaggaagagaggagaagcccactggatctgggagcacggtgctaggactctctaagcgtgacctccttcagtttggcccagagtggtcagatagtttgccggggcataggatggatgacaggcctcatacgcatcacgtctgaagggaaagcccttgaattttccacgctactttttagtaacagtaggctttgtcataattggcttcatgttccagctttcctaaaactgtaagtgatgttgggtgggccagcagcaaaataattcactttacaatttgcatgatagtctggaatgaaccgaatacctaaaaccaggaaataatagtagatatttaatggtttggggatcaaataagaatttactcccagatgtttcctaattaattggaaaaagcagaaggttgctggaaggccatctccattgggcatttacaggtgaaattcactcttcaactaggattttactcatgggatgcctgtgttcttcatttgaacccaattttacctatcatctacaaaaaaagaaaactattaagagttaaaaaaaaaaaaagagagagagagtcttgaactttgaaatccttcatccacgttttataaagtgtggggtcagattttttccctagttgaaattgaggaaatgagagttgccaatatgattggatttgtactgccaagatggggttttagcacttctaatgcattctggcaaggctggtatacttgtatcaagtgcacagccccactaccaccacctctaccacccacaaaaataaaaactagcaaaataaaatatgagccaacagaattctgtgggaatggcaagtgttttgtttttgtttttagtagtaatctttgcgagaacattccaaagatgatagttttacatttgtatgtttttttccgaggcacttttgaatcatcagatagattaaatataagttccatgtatttttgaaggtgggagtgttctttggtacagttcccccaaaaaactggttctcatgaggcttatgtggtaattctgttaacgagaatgtatgattatctgggatactctgttctgctctccatcctggataagagtttactttgaaagtctagttgatcttttgtgatttctgcacaatgtaaaaggtactttaacttcaggagatagggccagcaatcagatttgatgatggaaaagagtagtgtagcatttaagcataatgtatactctataataaatgtttacaagtccaaaagtgtgccatcagaaagtaaccagatcaaaggagaggtgaccagagaagctggaaagataagaaataaacaagtttcaaggttactgatctgtagctgttgctgtccatgcttcttggcagctttaattatgacagggagagggacccagagggagagagagagactgacttacacataaaggcattttatcacaaagccatctaaaacaaaagtgttaaaggcacaatgctgtgtttaaaaagcatgtacttctttaagagctcaaatttaaatatataatacaaacttaagatccaaggaagaaaatggacccaggacacgaagagaagttaacgccacaggtaatgcagatggccaagagatgtgtgaaaaagataatccagcctcaccaacagccacagaattgaaatgagatacctgtttctgcttctggcattgggaaagaaagaaaaatggcactagcagccttttttttttttttttttttttttccccaaaaaatttgctactcttgaggttctgtcaaagaatgtgctgtggcctctagaagcatttttaaaaagagactttcacaagtgattgtgcaaaattgtgaggtcactgaataggtgtgtatcctcctaaggaggtagcgttggaggagctgttcttgttcaatttactcagcacctgtgaagaggcttcactgtgatttgcctgtacaggtgtgcaggtaaaaatctaagttccacaggtagtgcaaaaaaatctacctccctaggtacctcgtacatttatcacagtttcctggtaaacagttctgctgttgttgacaaaattttatcagaaacattgcatactcttctctaaatagtagtttccctacaagtggctgtcttcagtttagtcgtttaagttatgttgacataaatgattatgtgtgtggcaggggcttttgcgtaggttgttgaaacattgcaccttttggactaacagtttttaccaaaataggcagaagtgacatttgcagccacagctgtgtggcattgagcgtctaaggtatgtgtaataggcagtgtatcggtagcattgataccttggtcaacaccagtaagccatgtaattgcccagaagtgggctctaacactagttttaggagatgcagccaaaacgacaaagctggaggcctctccctctgagcttggcctccacttggtcaaaacagtccccagtttgtccctacgggacacaggcctgccttgttaggaaatcagcaacatttaggagcccacaatacctcacataactctgtgtacagtaacagagaatggaaatagggctgtaagcatgaacaaccagtcaagttacaaatatagaatactctctcaattccactttagttagtcatggagggacagtgtgagttttataaacttataaggaatatacaaacagttccaaatttaaaataacttgaagtaacttttaagtgtgtgaaaagaatatttttttccaccctgtccatttaagcatctgtgacaggcagtattaagtgatgggtgtctttacgtacacatgcctgttgctcacagtactggggaagagttgcaaaatagtcacccattctgcagtgatttctctcttcttatttgtgaaagactcaaaaaaaaaaaaaaaaaaaaaaaaaaaaccaacaacaaaaaaaaggccaggcacggtggctcagacctataatcccagcaccttgggaggccaagtcaggtggatcacaaggtcaggagagcgagaccatcctggctaacacggtgaaaccaaccccgtctctactaaaaatacaaaaaattagctgggcgtggtggtgggcgcctataatcccagctactcgggaagctgaggcaggagaattgcttgaacccgggaggtggaggttgcagtgagccgaaattgtgccattgcactctagcctgggcgccagagcaagactctgactcaaagaaaaaaaaaataggggggatgtgggttgtgagagcgacactgtgtgtccatgcgtgaagaaacccggctcatgatgacctcgccccagaacgccgaagcagggccggtccagcctggatttcacagtgttcttcattgcctttgtccttgattttttgtcgttaccattataacttatctctctttcccaaatgtataagtaggctttgaatatgagtttaaaagaaagaattcggggatgatttcagagtacactagaatattttttaaaagaatattttataaaaatacagtgatagtaaaagaagtagaaggccaaattccgcccccagccccttcttaatattggactttattcctttgcttttttcccttgctgccatctaaggaggctttctgtgctatagcatccagttcctctgccaggcatttctgtaaagatgaggcaccttccactgttttattctccatcattagagcacgtgtcctgctgactcggagcagaggggaggcacacgggggtgaacattccctgacagattggatgtctcttaactcttttttcctggtatcaaagaatggcacaatttagttgatttgatagcgttaccaaatcgtttttcctttagaatgaatctagaatgcagatagattctgaggtccagatgggcctctctccaccaacctgtgaccagtgtacctgtgattttatcactgcacattcatagaaaggttacagggctaatcttcccgtgatatgaatcatgaaagtcaaaatttatgaatgaaaataaaaaggaatgaagtactgatatatgccacaccagagataaatattgaaaacattacctatgctaagtaaaagaagccagtcacaaaagacactacctattgtctgattccattcatgtaaaatatccagaataggcaaatctatagcgacgaaaagtgtaatagtgattgcctgggaaaggggcgtgggaagcatggctaacgggtattgggtttttctttggggtgatgaaaatattgttaagattaattgtggtggtgtttgtacaactctctaaatatactaaaagctaccaaattgtacactctaaatgggtgagttatagggtatgtgaattagatctcaataaagctattgtaaaaaatgtgtgaaggaaggggaagcatcctataacctataccatcccaacagcccagctagaggacgattcctgagcctccttctcagcctttgtgttaattctttgcattgatgacttctctctctttacccttactaattagctctcaaaacctctatttaataatgatgctatttataactttcctccttctggtttcttgcttgccctttttgtggtgtttgcttgtttttcttttttctcaatactctgcccagcgttgcgtgttggttccggagacttaagtgatccagtgggcactgtcaggcaattatttcttttgctcattaattaagtgttcacagatacattcagcagccaaaccttgtggcatgccttctgtcccagacagtgagaatctacttggaacttggatatttctgtgagccttgattatatacaccaccaaggggatggcatagaactaagttttttcttcttctccacaacagactttgttctttaatttcacaagcttgacatagcctataagacatcatagtggtaccatagacagttttcccttgatgcccatgggggatttgttctgggacctcccacagataccaaaatccacaggtttatcagcaagggtcactgctcaattgcaacaactgaagcagaagctcctctcatcagaggcagttactgcagcatgttctgtagggcaaatataaccatatgtaagtgactgtgctatcaggagacagaacaacaagacccagaaagactcagtgacccacagagccagttccacccaaacaagtcttactaatgagattagataatgagagtgtattttcttcatcaattcatgtagctcagcaaggctggaaactgcttgcacacttctgcagagaaaaaaaaaagttccatttgctggaactcaataaataaagaaggccttagtgggtacgtgttatctccttagcatcacctggatgcctgacccttttccagagtgtcatgttgcctgggttttgtccttcagtctaagtgatacacctcttagtgtggcggagaaaagggtgctgtatttcttcctgatggatacatgcttaaatggaaaagtagcatgagatgaactcccatagccccttccttttattatttttaaaatattcattcatttatttatttatttttgagatggagtctcactctgtcacccaggctggagcgcagtggcgcgatctcagctcactgcaacctccgcctcccgggttcaagcaattctcctgcctcggcctcccgagtagctaggactacaggtgtgcccaccaccacacctagctaatttttgtatttttagtagagatcggctttcaccatgttgaccaggctggtcttgaactcttgacctcaggtgatccacccgtctcggccttccaaagtgctgggattacaggcgtgagccactgtgcctggccggcccttccttttagacaatagaaacatgctgcaaccacataccaccataaacacggtgggggaagaggctgcaatcaacagtcaggaggatctgggttccaagcccaggtttgcagtgtaacagctgtgtgctcttggtgtgaacatttggtcatgtacaaatgaggataatgatactgcccccttgtgatcattagggggattaaattaaatgcagaaatatatgtgagatgcttaatgtgttgtaaggcgcatggaatatatttagtgaatattaactgtatattaatacaaagtcctgtattcagaatctccagtataaattacatttatatagtagagatatgaatagtttttgtgaacaagaagacctggaacttcaggtgactagaagctcagagtgagccagctatgtttgatgatagttattcttaagatcacacagagaaacggcaagcaagctgctttgggcaaaaaagagcatttctacactgttcagactgcctctgtactgttagaataggtctagggcgtgttgcgtgagtggtgactgagtaagatgttcagagggaagccgtgaccgtcatcttggaatattgtttgaaagtctgacctgtacaaagcagcactcacttcccctgcgtgtcagacacctgcatgagggctggggagggtccagtacaggaaagcgcatttttaatatgtgtatggaggaagttcgtcaagatgggtgccatctggcagtggagtagcacttcctggaaagtaatgagctcccttggactttgtttgaagagtcacccaggtttttgtaaagaagtgtttcagatcagtatgcaatggatgactgtaaatttctcttcagatctaagaatctgtgattggatgaaagggagaaaggactgcataagtgcttgttgcttgtaaactgggccaggtggatgtcatggccctaggagcttcttgcctgcctttgcatgccataaagcagtcctgcaacccagtgtcacctcagagggatgggaatgtagaagaagagagtgaatagggacagtgatgaggggtgaaaatatgtaactccttgccccttctgtataccctagtacattaggaagttcacccttgtctaggcttcctgttaggaagacagcagactcaaaatggagtctcaacccctttcaaagactgcaagatctccttgtacacactggacttgggagaaaatgagagctttcaggcctgctatcttaacaggttcagaaaggtgtggtccagccccctgactaaccagccctgctgtgcacactgagaattctgctcaggtgtacctttctgtgtgctcctgggtgcacccccaaagtgctggttctcttgaaaacctttttatttaggttcagacagacaaactgtggtatcttccattctgaccataaagtgtttcttctgggtctaactactatagtgggatattttctctagaacaagaggttgtttctttttggcattgagaaatgttgccgatgtgattttcttttgtgaacgtttaagacacagcgcttgccacttgaactttcttttgccgtgcgtagctgattccacataatggctgcagctccaggcagaaacctgtttggaagttgttttaaactcttcctggaatctctaggcagtggctcagtggggtttttttccaaccattccttaggatgaccagaagcttgacagaatcctcttgtcttcattttgagaaaatatgtctttactgtgtgtatgtgcagcatttggttttacctcgtgggtctaagcattttcaactaagcttccttttccaacctagcagacttgtttaaagaacttcaaactaatagccaagctgtaatacggtggctctctcagcctgagaagcctgtgctcaccgtcactctcttcttccctggggtgatagggatggggagtagtgtgtgtgagaggacagaagcgaggattgattgaagattattttacgaggcgagagcatggtggcacacctgtcagctgagtggactcagcgcctgccccggctaggctgtcctcctcctgtgccagccgtgggttccctgagtccctctgcagtcattcatgggtgctgaaaataaagataccctttctgtcgaaagtgttcgccgggctgcctctgcctccctggaaaagcagcagggcacacaggcttcctaggcagcccctgagggaggggctctttttattgtcactctggttagtttgaagaccagacagaaggcagcaaaaaccaaccctttgttgaaaactctttgcctttaggcccttggtaccatgttcatgaggctccagataattccacaaatacattattattgttacctagacttggggacagagaagggtgaaacatgggtctgggaattcacagatgaatatactgtaatcccctcgagcacatttcttttaaaggaatgggggtattctaaaggagtgaacactccactggggggctgctaggcccctgtgaacggtggcagccttggccacggtgtgtgctgtgatctctcctgggtcccccgggcatcctcagacctcccccacacccaacccacagtcccttctccatccatctgctgaccacaccccaggatgtttccagctcagatcacgcctgattgcatccacacaaactgcacgccaggcatttccgtttggatgtgtacacaaaaacaacacgtcccagactgagctgatctttctgtacccctcaaaagaaaagttctgtacccggccaggcctggtggctcacacctgtaatcccagcactttgggaggccaaggcaggaggatcacgaggtcaggagattgagaccatcctgggtaacacggtgaaaccctgtctctgctaaaaatacaaaaaattagctgggcatggtggcgggcgcctgtagtcccagctacaggagaatggcaagaatccggaaggcaaagctggagcttgcagtgagctgagattgagccactgcactccagcctggtgacagagtgacactccgtctcaaaaaaaaaaaaaaaaaaaaagaaattctgtacccttccagatggtcctggacatatcttgaatctaccctgcttttcctcatctgcactgctgtcctcttgatctgggctactgaggctagaatgcacatctgatcatgtgcctcctgcttaaaatagtatttttcctcttaagagtagtccaaactcctattgctggattaaaaggctgttccaggctctccctacctcagggcacaccatctttcctcccagtctcccctcccctctgtctccagtgcttccatccttcagtcatgctgaggttgtctttgttacctttgcttctcttggcccgcactctctgttggctctgccagcatccctatgcacctgctagctcctactcacttgtccagctttggcctggaagtcccttcccctggcaggcagccctaagctaccctttgcttgctactggctcatattctcactgcttgtcctcaggctgtgagccctgggagggctgggctgagtccccgaacctgccacgtctatagggtgtaacctacctgaggcctgactgctaaaatcaaaagaagcctttctcatttgcttagctgagctaagtcctttctggagaagaatgcccacgtcctgggtggacttctgttcggcctggggcaggacgctgcatgtcagttcacctagagcccctcgcttgccctcacccctctccctttccttctcctccccgtgttgtctcatggtcagttcctctcctggcaaggcaagagaatcataaaatctctttggaccatgtgtctctctgatgcactttggaggttgaagctcactttcgtgaagttaggagcggttaatcctcctgcacgaggatgcatgcctgctagggaaagcctccctgcgtttatatggaacagtggtgtgtaccttagggcaacccagaaacagctgagatggccctaaactcttccgtattttgattcagaagctttaccttatttgaacatctgcagaataagttctttcctttagaaatgattggggataaaattgtttgcattatgaaatattgtatggccaggtggcccctctttcatgttttgttccttgtgaagaggttgagtctcctattttttttttttttttggagatagagttttgttcttgtccctcaggctggagtaaaatggtgcaatcttggctcactgcaacctccgcctcctgggttcaaacgattctcctgcctcagcctcccaagtagctgggatcacaggcacgtgccaccacacctggctaatttttgtatttttagtaagagatggggtttcgccatgttgggcaggctggtcttgaactcctgacctcagttgatctgcccgcctcggcctcccaaagtgctgggatcacaggcgtgagccaccacgcccagcctatggtatgcttttaaaaatggtttctctgcactaatgattatttaaaaaaaaaactctggcaagaacaaaaacaaatggttttttaaaaactctagaaataatttgatacattcgaggactctggagagggagagagttaaaggctgatgtgtgtgactctttttcctctccccccaaggaaaaaaaatgaagagaaggagcttttaagtgcagtgcctcgtttttatgtgattgcaaacctgaaccaatccttttagtggtggatgtgggacatgttagcttttccaacagtttagatgggcctttgtttttattgttggtcactgtaagaattccaaggaatagaaggatctcatgggcaaaatcagtttgcttttttctctgtatatttgttagtttatagcagcttctattttcctcctatttttaaaagctgaaatgcctttaatcgcactcagtgtgtttattcatggaagccagagaagagggtcccttcctttcccccatagcgccgtaattggaaatttggtagtactaggtgaaattctcagttttggcgctcgcatggaacagccatccatctgctggcgagacacactgcccggggcttttcaagaaatcccttaatggtcctgaacactaataatatttatatacattgagatgagacaaaatttacagcgggctctggggctggctccaggactctctaatcccacacttgctcacgttctcttgcttgcctcctagaatcctttcaggttgtgcttcagtgaggggagcatggtgtccgtctctgcagcaatgcttatttatgcagttcgtcctctaacaaacagagcaactttccttttgaccttcccctcttctccccatcacattccattgctgcccccgcatagagcatgtgcttatgcatagtttgcatcatttaacacgaaggaaccccttgatttgtgatccctttaagaagttgctctgtatataaagaaaatgatttttcctggttggttttactgaagttccttcagaaatagctcccaccaccgaaacacacctgacttccccagcctgtgtatcggttgtggcacggactgactgactggatggtataatttcactcactcctttgggaagtttcgggggactactgctcagatgtgtgggaaatgcggaatatatctacaggtactttgtcagtttttttttttcttttctttctcatcctggaaaatcccggcattgatatttaggtataactatttgcaagcaagtgcagagggacatttttctgttcttttcaacgttcttattactactgcattaatagctacttgatcttaatgtctattacacatcattttatataatgttttctttaaattgtcagggaaagggattctgcaagtagatgttggtccccccagttagtgtctgatgatgatggtaagattctcagagtttccttcctctaatgacaaagcatggtgatggtgatgtctgaagagcagcctcggtgctccaagatgggtgtatgcttaatactgctggcacacgcctgacgagcgggaatgtgagcgttgtttctgtaaccagttttactgaacctcacagatccattatacgacgtgaattttgtgggaataacataggctgggagtctgctctcttccagcctggtccctctcttctttcagccctaccctctctgatcatcatgtcccttgcactgcggccaggtaacctttctgatacgaaggtctgggcatgttgttcccttgcctaaaactttccatggtttcgtattatccacagttgggctaaaccctctgggacaggccttcagtgcctccccgggcagtggtccctggccttcttcagtaacacccaagcccttgcacccacagtgacctcgttgcttttacaagcatttacatgtgatgttctttattcctcccttgctcatctttccactttcaactccacaaaaccgtcctcggcacccagaagcccaggaaacaccaggcagctccactcactcccgtacttgctgtgtcgtccgttccctggggacaggattgtcgctgatcctgcgtgcatctgtctggcacacaggtgcagcacacattaaatagctgctaaatgaataaatgaagaatagatggaattatattctgttgtgaccagtttaaaaacatgaaattggaatacccaattgcagtgtttctttagatcttggaccttgaggtgacctctgtaatggatatatttgaaattattaactgtcttcaagtgggggtttgatgagagagagagagagagagtgtgtgtgtgtgtgtgtgtgtgtgtgtgtgtgtttacagaaaatatgctaggtttgtacattcaaatttgtgttatcctcttcaagaaagtcaccttggtagacagcatatatatcccaacattttaggaactcataaaatgcatacttttttggtgtgatcagagatgggtaactccttattacttgtgggttagattagtttttggaaatagcctggagtcattgagagccaatccttatcaacaaaatggcataaatggacaggaatgggtttcttcttcactttagagatagctctgaagacatgtctcagttgggattagttcagttgcatatatgaatagcagtcattgaaacaagataaaagtgtatgtctctcacatctaaagaagtctggagtaagcagtccagggttagcctagcggccccactctcataagggactaagttccttttatctcgcttcaccattcttgatgtttcgccttgtggtccaaggttggtacttgagctccaagcattactactgcattccagccagcaaggaggaggatggccatgccctctttgttctcaggagtcttccaggaagttccagtcacaacgtttgtttatatctcactggccagaacttaagtcatatggccacctctagctacaaggaaggctgggagatgtagtctgtaactggatggccatattatcaactaaaaattactgaaaatgacaagaagaataaataatggaaggcaacctgttgtttctgtcaaaggatgacttcaaaagagaaagttgcaaaagtatttcaagcttgacagtatcatgacagttttcttcagaggtgacgctattcatttgcatgtccaagttctgatatctgttttcaagttcacctatttgcagcgaaataggaactcttggaggcaactagtgggtgtgtaaaccggtacaaactttctagaggacagtttaacccaacaagatgaattctggaaattgatcctaatgaaatgttaagggtgctcatgaagattgctttgccgattgcaataataaaaagtaaagaaaatatcttataattggggacaggtgtaacttatgatacattccacaatggagtgtaatactgctgttaaatgtttgtggaattcacaatcttttatgccaaaagaaagctttcagaatggcttgtcttttttgtagatacttgtatttatatgtccatgcacatacataagaaaggaccagggaaggtctgcttgaagatattaataaaggggtcacttgtgggtaggtggacttacttgttctctatattctctttacttgtttgtgatctctggtttttttaatcatgtatttttattacaagaaaaaacaaattctagaatctccactcaatattgcatgtcagagtcaaaaagatacacatttaaataattttgtattgttttccaatttgaggataaagtaggaaatgtataatgcaaaccagatttcatattttgttgatttagacttaatttacaagtaaggctgacagcccacagagtgtgatcacgacagcattgttatggaaataaatgccagctcatgcatttgggatgtacaccatggatctgtggttattagatactgatttcactttagcacacgaagaggcttagcggaggtggcttctaatatcctatggttctgtgggctcggagatgctactcacccacttgtcagaggcattgaaaccagagcaactgcatcttgaataggagctaggtaaaatgaggccgaattcccagacagttaagacattctgagtcacaggatgaggttaaaggtcagcacaaaatacaggtcataaagaccttgctgatctagcagatgcagttaaagaagccggcgcaaacccaccaaaaccaagatggtaacgagagtgacctgtgatcgtcctcactgctgcactcccaccagcgccatgagtgtttacatgtcatagcaacatcaggaagttaccctatatggtctaaaatggagaggtatgaataatccaccccttgtttagcgtgtcataaaaatgggcaaccagcagccttccaggctgctctgtgtatggagtagccattcttctgttcctttactttcctaatcagcttgctttcagtttacagactcaccctgaattattcttgcgtaagatctaagaaccctctcttggggtctggatcaggactcctttcctgtaacacacctatgttcttggacttaagaatgaccctcagacatggtgacttctttgtcatctaacagctttggcttatttgaggtaaaacctttgatatctaaggcagcagaaatttccctgaagtcattttgaatggtatcatctttactatagtgtagtttaatcattttcaaagtaagcatttctgcacactaaggctttaaaagagttttcagtaaggaacatatttgaaatggaaagtgagcagagcacaatgccttttaaattactgataaaccatagagttcctgtagggcttccactggctgacccacgcctgaggcaaccctcaaatgtgggtattatccccctcattttacagatgggaagagagaggatcaagatcacagaagctaatggtttgtcccagaccaaacaaggagttcctaggagagactgaactttaaagatatcgactctctgcaggtctaagtggatgaaaggacagtggtgggggtgaggatttcgtagtgtgtttttgcattgtctcctcaatgagtgatctggtgctggtggtagcagtgaatgacccagaaggatgctggccaggcccagagaaggcggtgcctcccctgcccggtctcatctccgtctctcctctctctccacagtgtgcccaagcacgtgtgggaagcgggcgtgcaccgagaacaatgagtgctgccaccccgagtgcctgggcagctgcagcgcgcctgacaacgacacggcctgtgtagcttgccgccactactactatgccggtgtctgtgtgcctgcctgcccgcccaacacctacaggtttgagggctggcgctgtgtggaccgtgacttctgcgccaacatcctcagcgccgagagcagcgactccgaggggtttgtgatccacgacggcgagtgcatgcaggagtgcccctcgggcttcatccgcaacggcagccagaggtcagtcgcggccacacgtgtggtcactacccgccccacctcacccgccaccctagcacacaaaggtagactctgtcggttgtttcatccgggtgcagccctcaggaagttcactgaggtgggtcattttgagagggctggcttaccttaaatgtttggtgagattctaggaacaattggcatggcttaccgcccccctcaccagtttgttttatattttaagtgcatactgcctggccatttgaaattaagtacttgcttgctggtttcgatacccagagttcatagtctctctgggtacttgccaagctgccatctaagagacagggaactgtagttttggattttcctagtctgggtgctgctagccaggtgaggctttggaagtgcaaaagaaaagacatgctaagcccccaccaccatccttgagaccagcaagcggacctaaacatcttagtgcaagagctagcagcagctcagagtaggcagtagcttaaaataagggacatttttccatcagcacttccttcctctcatccccctctaccttgaccctccctcagtgctcatcatgtccttcattttccttcctgaactttgagacttcacttgggaagcaaagaagttccttatggccaggcatgtggctcacacctgtaatcccaatactttgggaggctgaggtgcttggatcacttgaggtcagagtttgagaccagcctggccaacgtgatgaaaccctgtctctactaaaaatacaaaaattagcacctgtagtcctagctactccgaggcaggagaattgcttgaacctgggaggcagaggttgcagtgagccaagatcacactacttcattccatcctgggagacagagtctcactctgtctccaaaaaaaaaaaaaaaaaagagaagttcgttataacaaatgccatatgcccttttgtacatgtcaactggacttctataaatttgtcattggtttatgcttttgaaaataagatgttagcattgtttaaaaatgtgataactataactttgaaagcaaaagaagattggagatttggggttgctgttccctttcctggagcagagtaaagaacttttaggggctcacgcctgtaatcccaacactttgggaggccaaggtgggcagatcccttgaggccatgggttcaagaccagcctgggcaacatgcaaaccccatctgtacaaaagattaaaaaaaaattagtttggcgtggtggcacacacctgtagtctcagctccttgggagttgcaagtgggaggatcacctgagcccttgaggtcaaggccgaaataagccaaaatcgcctcactgcactccagcacaggcaacagagaccctgtctcaaaaaaaagaacttttaggaaagttctgttttagtggactaaatgcctccttcatgattagcaccagggggcctgtctttctgagtctgtcaaaatctattctacaaatataaaaatatcgttagaaaagtaggtgttaattttaaatataatttttgctgcagcttatgaagtacattgaggaagtgtttataaaggggattctttttctagtgtattatttggagacgcagcttctactgtaggcttaccttcaaatcaaagataatacattcttttatagtattagatgtagagcaactttctccctcttataatctgtataaccattagcatactaacaacaagaagaaaattactctgaatactttaaaatgataaataggccaaggacttcaatgagctgtagaggatacatattacatccaaaatcagtctaccacattgtactcacattttgttggcagccttcgagtgtaaaagggcttttactggtgcacacctcgggcccaggggcagtgcctggaaccaagttgaggctcagacactattcagacgtcaccttcctccttggggtggggttaggggagtggtagcttgtccatgaactcagtgtgctatcgtctttgttttgtgaatacattttcttaatgacatttggaggccttcagtcgttctgcagccaccagagttgtggcaaagtgggaatgctgtccatttgacagtgttgtttcttccgctctagtgcactcttcagagaattgagccattatttcccctattcattcttacagtccgttaaaaactatacatctacctttttgtttaaaaataaaacaccataaagaataataaattcccttctctcagcctttgaggcttatttaacaattactttgaaatatttaattttttcatcttgtttataccttctctataccatagtggatttgaggaagcttaatctataaacatgttatcaaaacacttccttagaaaaacattttttaagtgcttgatgactcctagactttttaccaaagatgattggttccattttttttttcttttcttttctctttgatagactctggctgtgtcacccaggctggagtgcagtggcacaatcatagctcactgcagcctcaaactcctgggctcaagtgatcctcctgcctcagcctcccaaagtgctgggattacagatgtgagccactgtacccagcttcagatttttctatttgagtgaaagatggagagaaactaaacatacacttatggtacaacccagcagttgtaaccctggatatttatcacagagaaatgaaatttatgtcaacacaaaaatatgtacaccatcgtccatagcagctttatttgtaataaccccaaattggaaattactcagatgtcctatgatagatagttagttaaactgtgggacatccacaccatggaatattattactcagcaataaaaaggaacaaaccattgaagtacactacttggatggatctcaaggacattatgctctgtgaaaaagccaacctcaaaagatcacatactgtataattccatttatgcaacatcctcaaaatgacagattatagccaggcacggcggctcacgcctgtgatcccagcaatttgggaggctgaggtgggtggatcacctgaggtcaagagtttgagaccagcctggccaacatggtgaaaccgtgtctctactaaaattacaaagtttggccagtcacagtggctcatacctatctcagcaccttgggaggctgaggcaggcagattgcttgaggtcaggaggccaacatggtgaaaccccatctctactaaaaatacaaaaattagccgggcctggtgatgggtgcctgtatttccagctactcaggaggctgaggcaggagaatcacttgaacccaggaggtggaggttgcagtgagctgagatcatgccgctgcactgtagcctgggcgacagagtgagaccctgtctcaaaaaaaaaaaaaaagacagattgtagacatggaaaacagattagtggttgccaggtgttagggacattggggactaggttgggcagggcagtgagtatgaacaggtggcattagggagagcttggtggtgacggaacagttctgtatcttgattgtagttgtgattacacaaatctacacaagtgatcagtgacacagcaccacacacacacacacacacacacacacacacacacacacacacacagagttaatttccaggtttgatacttatatcatgtaagatgtagtaaacattggaggaagttggatgaaggctatgtgggatctctctgtaactttctcgtaaatctttgcagctttttgtgactctataattattttaaaataaaatttttttttttaaatggaaagtttatagggtatgtagataaattagaaacaacagaaggccaagtaaaaaagtgctgaaggaagcctctacccaggctggaaatgagaatgttgaatgcaatggtagaggaaggactctccccatctgtgggtgggtccagttcctgtaggacccttggggaagccatgacccccattctcccaaacacacaataggaaaataccagagaagttttgtttacctgttagcttttaaacaaaacagaaccctgcatctttgtcttagatacaaaataaccttcatgggtagggggaagggacattaataaaaagagctataatttacattgtttttcttgaatgtttttacttcacgaaatttgagagatgatttaagaacaataatgtacatataatggctccccagcttaccatcctattacacacacatcgcataagttcgtattatttgtcttgtttggaaatcagtccaactttctgacccttgttctatatataactatagatcccaaaggttcagctgctgggctagcattttgtctgctatttcctaaataatggtaggtaagcaggaaaagtgccagtcttacttgtccctgactcttggtggttcgtggcatgttcaggatagtatttgaaacaagagctcattacaaagtaatggaaaccccttgcttttattgtgtatgcagcaaaagcaacatttggatcaatttacaagtttctgcaaaacaccgtcaagaaataatttcggttgtgctttagcaagaaaataatggatctgtgctataccacatgccttttggtatccctcactgggctttgccaaaacactgactgcaggagctagactactgttaggcagagacactgcactccctttgctgtccctgccttctctcctagcgactcctccaggtacacaggccagggtcacagtatcagaaagcagctctgttttcctccagaaccccccaagcttcctttctgcagcactgtctctcccacatggaaccagctggctcaccagtcaacagcctatgacacacaaatgccttgaggatgcagcatgtattttgtctggaagcaagcaacacgctcttcctttgtaggctgtttctccttttgcttgcaatgtgagtggcttatcttgggtgggcttgggggtgagataccatgtgaccacatgaacacttcaaaacagttgctttttctaatgcatgctgtaataacaatgaaaagcatatccttatggtttttttaatgcaagaagacagactcaattatgtgtgtttttgattttttttttcttcttcaacagcatgtactgcatcccttgtgaaggtccttgcccgaaggtctgtgaggaagaaaagaaaacaaagaccattgattctgttacttctgctcagatgctccaaggatgcaccatcttcaagggcaatttgctcattaacatccgacgggggagtaagtattccatccccctggaaaaacggctagatctcatggttttcttttgttgatgcttttcatgctcccgtccctgagtcaccactaaaatatgggcttagataaacaacatggtgtgtaagcctcacgcatgacgtctcttctttgagtttccctgaaagataaagaacagattgaaaggcaatctgtcttttagccattggcacgtcatttattcctgtaaagagggtcatcgctcatctttttgttagtcacatcttgcataggagaggcaagccctgacacatacaaaccccagaagagaccattggatcagacgtgtgactcagcagactccagctgtagccaaatccacacatctttcaagtctaaagagttttggttacttgaatttactgagaagactgagcaaagggaagtttagtgatatcacgttaaaattttatgaagtccaaaagaatgctagatttccaaatttacttgtgagagacaaaaggatacaagtgtgtgtcattgtgtacataaagtttcggtctcacccctgtacaatgacctttatttgcaatagatggcattcctggtaagttgcttctgagttggatttgtgcaaaggatttcccactgacttagcctatgatctcttcacttctttggttttttgtgtgtttgttttttggttttgttttgagacagggtctcactgtatcacccaggctggagtgcaatggcataatcatagctcactgtaacctggaactcctagtctcaaacaatccttctgctcagcctcccacgttgctgggaccacaggcacacactaccatgtctggataattttaaaaatcttttcacttctgatttttcattgccaagggcttctagtaatggtgccttaaattctctgccactgggaccacttggtcaaggtactgatagttttataagctagaataaatatcgtaaaatggctttgaagttgaaaggaattttggggggggaatccttttatgaagaatttttttttttttttacagtttgagaggaaaaataatgtattttgagaatgtgttttccttaatatttgttaaatgagtagactgtattcttaaggtttagaaaggacagaaacaagtttgtgcttagttcttctgaattcgttgatatcccttgttgctgttcacaatacacccactcccagccctccgtgatggagataactctgttccccacaactagggcttgcccactctcatggtacttctgatgtttaattcttttggctgtgtctgcatttcctcatttacttttaatttgcttatccctagaacataccttttgagtgcctaaacttttttatcttcctgtcctgaagacaaaaatttaatctgtgaattaaacccatggagaagtatcatttatgaagggattggtacatattgatgcatgatgatgaaatgtgtcttctggtttatgtccattgcaggaaatagattggatttaggatgatgggacatctcattagaggggaaatttcctgatcttgactaaggcatgcttcctgccccacgtttaaaattcaggatctcttccttaaaacatcaactgcacgcaacctctcatctttccaacttgaacttccctttaatttttcttggaaagctattaaattaaattagatgtagggctttatcctttagtacccttattattttatttgtatcaactcaaagcaaaatagagcattttattaaatatgtcttcataaattacgcacagtaaaatcccattaattggaccacacccagttcattatagtgtttattataattttagcattagttgaactgaaaattggtttttgtttactatgagaaaaaggtagactaaacaagatgaaacctgttgtttgcatattatgtttgtacatctttattagcaactatttttccaactattttcaactatttttccaactattttctagttataaaagcaatacataaatactatagaaaatttagcaatgcagaaatgaatttttaaaaatccctcatagatagccattgttaacattttggtgtattttcttcaagtcttagtaaaatggaacctttaaatatagatccctgtatcttaggaattagaaaggcagcaaaggcagttcctaatgagatggagaaaatgttgatttagtcatgcccttgtactgtgggggccatactgtctgttgacagagcatattaaaagacgttccctacattcgtcagccttagctaattggcagtctggtatttatgattttatattttgttaatcagcttgggagctgcagtaccccccagcctcctagaaacttggcttcccctgcctgggaggcctcgttccaggagtcgttgttgagagtcaagccagggaagtgtgtttttgtcagggagcagccagtcctgtgctgggagcatctcagggggcacctgccgttgaattgttctcacttgtgtttgtaagaatccaagtatgtcacccttacaccaagtgagcacacagtgacacaatcccctttcaatgtagataacattgcttcagagctggagaacttcatggggctcatcgaggtggtgacgggctacgtgaagatccgccattctcatgccttggtctccttgtccttcctaaaaaaccttcgcctcatcctaggagaggagcagctagaagggtaagtgccccaaatttcatgagctgacgttctattacaaaataagcagcgtgcttatgaaactgtgttgctgaggtaagagccctccctgccttgttaaagagaagaaaggaggaagccgcagtattgcctgtgctgctcgagtaggtcttgggtggagtcatggttctccattcttaggaggttgctgtttggaaaacagagatgttatcacccttactggattttgcctcatcagtcaagggttgcgtgtctgactgtgaccagtgagacggcagacgggggtgcgcttagggcttttctgccaagaatgacagcagttggtctggagtgctcacctccctgtgaaatcattgttcgcgcgaccctcatctgcctcaggatgctgtactctactacgcacaactgctccatcttttaagatattggaagtgagagcacgggaggagcatgggcggttcgttttgttagaaagaaacccggattcacgagatggtttttattgattagtttacaggatttgcactattgatagagtttttgccttggcacaggcctgctttgtgataggggttttaaaataaccgtgggcttttcactggaggataaaagccggtgcttattgcatgcacaattgctttccagccgtcagcctgtgtgtacctttgcatatgtacttttctctttaaactctcccttttaaatacgactcttgccaggctttaagtgaatgcttcaaaataaaaggagttatcaattaaagagtgaattccttccaaagagaatttgggaaaataatttaggaaaagaagaggcgagaaggtcatgggaaaggttgtctttgctgatttatctgccccaactggataaagttactgcataagggtttctttacagcctccctgtttttctcagactaactcttggtcagtcttaaattcttaaaattccatcatctgatagagctaacgagagcgggcagctcttcattccatccttgaaaagcacagtgtcctccccactggggaacaccaatccttaaaaaacttctttctcattgcaaatcgaaggaggctgccgctgcacccagccccagactcctcagtcacttacctggcaagctgaggccctaccagtttaaggtgatgattattgtttcttgtattaaattttaaaatgaatttttctccgctttttttttttctaagtaggtttgtgtttctggaatctcgggtgtctgtgagcatttcttcttcagcagagcagtagctgtcaaattttcttgttgcttaatgatatacttttttgtttctagactaagcaaatgatagacatagaggtgaatgctgagaggagagtttaattaatttccattaggaattattatgtggttaccttttcatggagtgttaactaagtattgtgcacttaaatgtagttagaaattaaagcctgatttttatttgcaagaatatttatgatgtctttctcattatctgaaacttgcataaaacctgaagcatcagcaaaatctttttaaggttgcgtgctcaggtgtttgggaggctttccaggtaagcccgggcccctggcctgctcttaccattttagatgcaggggagggcaagtgggccttgggttttccctgctgctgctgctccccagtagtcctgcagctccaaggatgctggctccagcctttcattcctgcgtgcagcttctaagaggctctttcttgagcttgggctcttaagaatcttttacctcccgatgggaagttttctctcaccctgtcttcctggcccatgaccacaaaggtatagcccatcctcacgatgatgagctccccaagagctctgtttgcttcaggtgttgagaccgctagcaacacctcagctgttcatttctccttagactcagggacagagttaggtctggccccttcactagctgccctcacttctgcaagaagggaagagtcagagcgagaaagagaaggacaggatacgatagtcagataaacatcagcagtgcaaagcagaactcgcacagtgatacaagggaaagaaagaaatgtgccctaggcatggagaagagccagatacctgagaagatcagacaggcttctgacaagaggtggcatttgagatgggccttgaaggctttcgggaaaaacttgaggaaagcagaggattgaagtgaagaaaggcaattcaaggtagggtggcaggagcaaaggcaacgagttggggcatcctggggcctgttgggcaactaacactggagaggtgggtggtactagagttatgtaagatgttttgcacgcaggtataaagggttataatttaggaagaccatggaacgtattcaaggcttttgaatagaggagtgttagcagagctgtctgaaatttttatttcggtgtgcttttggtttaagccaagatagctttcatcccagtgtttctcaaactttgctacacattatggaatcattgggggtgggggcaggggtggagttgagaaatcctgatgtccaagttgcacccccaccccaattcaataggagcgtttggggttaggatccaggaatcagtgcttgtctaaagatccctaggctcttcagcaggcagcaaagattggaaaccactgctttatcccttcatttcttcccatgtgcatatcacaaagcactttgacggttttttttcctaaatattttcccctcacactgctgcctaatgttttagaggttcacccatgttgttaacacgtgtcacactattttcttgaacttttttttttttttttttttgagatggaatcttgctgtgtcgcccaggctggagtgtagtggcgctgtctcggctcactgcaccctctgcctcctgggttcaagcgattctcctgcctcagcctcctgaatagctgggattactggcacgcaccaccacgcccggcttatttttgcttttagtagagacggactttcaccgtgttgttcaggctggtctcaaactcctgaccttgtgatccgcccgcctcagcctcccaatgtgctgggattacaggcttgagccaccacgcccggccttcttgaacttcttttatagccagtgataacataaatgtttccatttggttcaataggatgaaagttctgttctgtagccttttgtttttgatggagaacagaacaattcaaggtacagagatccttcaactctgacaaccttggctttccaaaatgtcactgagatccccctcaaaaagtctcctgagccatccagaacagaaaattcaagcattttacatagagtagagctcttattcctcactcagagcctgttgacttttatatcgcactcggcgtgagctgattttgtaacccagttacaaaagccatagccatggtttcctcaaggacaccatagggtgtatttctagagtaatgaccttagacattaagaaaatcaagaccgctctgctgtttacaaaggaaacaggttttgtaatccacatgtacacaatttttataaaatagctaatttttaagctcttgagtaagagaatattttcactatctggaaaatccccttgtttggacaaccttgtttcctgatggcatcagataaataaggagttaaagtttcacattatttggtgctaccaaggattgttgccttgaaaagaagaaggaaaaagtagatggagggtggtgagttaaaagaattgaaattcgcggataggcatttctatgcttttgttcctaccactcgactgtgcaacacgcagtgctttgtaataccttcttggagctcaaaggtcaggctgaaacatggccgctttttcacatttccctgggacttttggaaaatatacaccaaccctgtgacctagcaattccgggatccacccaagagaaatgaaaacatgcccacacaagacttgtgtatgaatgctggtagcagtattactcataatagcctcccgggattcccccgacccccagcccaaaagaaagacccactggaaaccattcagatgttcatcagcagatgagtggatagaaagataaatggataaatgaaatgtggcacaaaggacaactgactactcaacaataaaaagacgtgaagtatgacacgtgttacaacatgggtgaacctctaaaacattaggctaagtgaaaagaaaaaatccagacacaaaagactacatattatatgactcattcgtatgtaatttgcagaaaaggcaaaactatagagacagaaagcagaccagggatggctgcaaggaagaggtggagattgaccaccaatgggaatgagggaactcttggatgatggaagtgttctggaactgagtagtggtgatggttggacagttgtgtaaatttacggaagctcatggaatgatgggtgaattttttttttttttttttttgagatggagtctcactctgtcacccaggctgcagtgcagtggcgctgtctcggatcactgcaagctccgcctccgggttcacaccattcccctgcctcagcctcccgagtagccgggactacaggcgctcaccaccacgcccgactaatttttttgtatttttagtagagacggggtttcaccatgttagccagtatggtctcgatcatctgacctcgtgatctgcctgcctcggcctctgaaagtgctgggattacaggtgtgagccaccgtgcctggcctgatgggtgaatatttgataggcaggttatacttcagaagtaaagctatttttaagaaacacctaaacaaagaggaaacattgtctgaatatctgtatggtgcctggttccacctagatagacatatccacccttgctgaacccctaaggttgatgtaaatattggatttgggggagagtggacatgatataaaccagcctgtttgcagatggattggtgggagcatctgcagaaaggcaaaaaaggccaaatactcttatcagttgcagatggctctgttgctgatgacagcctgtgtcctgggttctgatgccccctagagacagccgtgaagaggcaattttctcctcgaaggaaggaactggaatgattggttgtataattgcagaattgttttcagtatgtcagcaagcactgaaaatggggaaactgtcccttcctacctctgtaggctggagacctcgggttcagctccatttatcagggcacaggaccttcctgttctgagactttgttccaggggactttcacacttcagagaatagcacatgtcatcctgcacttttgtggggtgattaaaagctcacggtatccttttatgtttagcccatccaattcttccaactggcctcagccagaaaagcagggaaggcacccccagtttgcagctgagagactccagcctgggagagctgaataaatcttttgcccagaggggttcctcagtaaatgctggagatgaggctcagacctgacctttggattcccagatggagtgctctgaaccgtgtacctggggctgtcttcaccactcaaatatcgatagagataacatagagatgtcctcaggaagataaccaactgttcccatcctgtgtggtctacagattgggagatagggcctacccaagtgtagaaataaacattttttacaacatagagaaggctgagaaccaggataccaatatcaataaaatctggatatcatagagcacatggaagctaaagaaaaataagtaactggtcaggtgtggtggctcacacctgtaatcccagcactttggaagaccatggcaaggcattgcttgagcccaggagtttgagaccagccagggcaacatagtgagataccagctgttaaaaaaaaaaaagaaaagaaaaattaaccaagcatggtggggcatacctatggtcccagctacttgggaggctgaggtaggagggtagcttgagcctgggaagttgaggctgcagtgctctgtcattgcaccactgcaccccaacctggattacagagtgagaccctgtctcaaggggaaaaaaaaaaaaaaacctaatttttaaaagcattctttgaatgtaaaggcagtaagctaagaaacaattaggaaatcacatttactgaataatttacttaagtaatctttttcttcaggaaacaatgataactttagcgtatgcatattttaaagatgtgcagacaggtctctgccttttaccttctcttaattctcacctaatcatggaaggaatttagcggggagccttgccccaagctgtggctcgaaaaacaagcatggtattgacaggcagctcatgaatggcttgattattattttgacaagggttttatttttatttttctttagcttccacaggctccataatgcctgggttttattgatattggtatcctggctcccagcctcttcaatgattgtaaaaaatgtttgtgtttactgtaaaaagataatcttgcttttcaaagtgattagtcaaatacacagaatttcagtgtgcctgccattcatttgtcaaattcctggtttataattcatgcttcctcccgtgggggagaagaatgttttgttcagaaggtatttttggtgtggttccgttccctgctagtgaaattagtttatgaaaagaggcctggttctgggtgtagatggaagtttggcctgattaattggtccttaccggcagcccagaggtttcttcatcaacaaggagattttgtcctgtaactaactcaggtacctggaagcagcccgacatttgggggtgcatcgctgcagtctcctttggagctggagaaacctatgagcaagaatgggcttatgacacatccatttccactccatccctccttccgttgtatgactgcatggagcccctctgacctccagcagtgtcacctgcagcctggtagtgagaaacagcaggtatggatggggtctacccccagcaacagtagcgccagctgggccatatcctggcactgctccccaggaaacacaccttgtgttgcattgaccagatctgggatcatttggacaatgtcttatgctgcttttccaggatagctgtgtgttcaggagggagcccttactgaaaggaaagaactgttgacttacaagtttttgctaccggtttggtggtcactaatgtgtccagaggcctgaagatgggcgtgtgaggagcctgacttagcttcagaggctctgtctttcgactcacttgtgtgctcactgcacccctgtgctggcaggactccaacctccacccccagcacttgtgtggacagagagcccagtgctcaggaaagggttgggcttcaggcttgtgatgcagattccgtggtggctctgtgactccttctggtcgttcttaaagtagacagggagcttagatgtcacctgtgcattccccttgttgtcctacgagtgagtaaacagggctacagatagcactaagggatctgcgcatggctgtgcagctcattcatggcatttctggtcctgggtcccagtctctgaactccttcctggtctgacgtccctttgtgaatgttcaggaaaatgtcacagggctgcttggcagcattgtaaccataatttgtgctttactgtaaatgagaatcaggctgaggattgaccagctggttagaggtcctggtttgggtgtaaatgaagaccctcaccagatgcagagagatccccaatggacatagcctccagggcagacgaagccttaggggttctgttttgtcctggctacgctggctctgcagggagggctggggttctttctcctttgtgtgtttatacattagatctgtgagtggatcttagaagtcactcaaagtactgcactgattcccaaacttagtaagaagcagagcaggaagaggagaagaaggattcacggtccatggggatcaggcccatcagcacagaggactcagaagtcaaccctggcattgtctgctgccttcctggggaagccagagagaaaggcccactgcggggatctttctctagacctaagccgtagctgtctgctttcttgcctctccagggatggacttgtcctgccacctgggtagccagatagaacggcttcctgtgctggttggatctgctactcgtgtgcacaccctctggggcagaagccacgtctggtttggtgggctttggtcctccaccacctcactggaactcagcctctcctagattgctggttctccacgtgtggtccagggaccacagcaggggtcagcaccacctgggatttgtgataaatgcagattctttgcccaccccagctgaatcagaagctctgggggtggggcccagccctttgcaaacaagctttgtgcacactgaacttggagaaccactgtgttggactccgagtcctcttgcctggatgagaggcccaagagcactgcatgttagtggctcttcctcctcccccacacctccagggactggagctggggctgctcagaatgaaagatgaatgggggagggagaaggcccagggttgaccccccacaagcttgtctccctgtctcatgctgtctcctatcccatcatgctgctgattgggcaggatttacttccatggataatgggagactttagagcaaagtgtacgctgttccgattgggtagcagagcatgtctgttctctcatggactgctttcaagcacgttgtacatacttggctgagaaaaataaccaaaggcatttcttgggaatgattctagtaacatcctctggtacaagaagcattatttgatggtaatagtggtcatagaattaattagcatcttaccgattttgatatgttatccttgaatcatgttgctgccattgttaacagcaactgtctgttctcctatagtgttaataactaaatctcttattggcaaaggaaatgtattgtggagcaggtggcaaagaggacctgtgttacgtggccagcaggctagaggggactgtggccaagggcaggtgcgctaacatcgatttctgtgcttctaggaattactccttctacgtcctcgacaaccagaacttgcagcaactgtgggactgggaccaccgcaacctgaccatcaaagcagggaaaatgtactttgctttcaatcccaaattatgtgtttccgaaatttaccgcatggaggaagtgacggggactaaagggcgccaaagcaaaggggacataaacaccaggaacaacggggagagagcctcctgtgagtgacagcatccaaaacaccgtgggcccaaccatcatgataacagcagaccctcctcccatgtgtgatggcagctttcctctgcggcccctcctggtttcacatgggggaccactagaccatcttaactagcactttgctcctacttatatgtcatcacaatcagtagtgggcagatacgtgatgtattcgtatttataaattctgtacatctctgtgagtgtgtgaaacacttataagtaggttctcaaactttaaagtgctgcttacagaatgcacagttaaatgtccttttatacacaggtgcacagttagatatttctctttcttttttcttttcttttttttctttttttttcttttttcttttttttttttttttttgagatggagtctcactctgtcacccaggctggggtgcagtggcatgatcttggctcactgtaacctccacctcggttcaagcggttctcatgcctcagcctcccgagcagctgagattacagacacctgccaccatgcccagctaatttttggatttttagtagagacgggatttcatcatgttggccaggctggcctcaaactcctgacctcaaatgatccacgtgcctcagcctcccaaagtgctgggattacaggcttgagccaccatgccctgtccgattatttttcagggaagagccagtgtgctccagccctatgagctctacccttctgctcccacagaagggaagcacaggcctgtggggtggagggggctctgccctaagcgcagcccctgtgggccacgggtttcctgtcccttacactcggctgccttgtttctcccaccccaacatgaaaaagatggagtgagcctgcagccctgagttgatattgctttttaaattgagaacaatataattacagccttgtactggttataaaactttaaggtctcatatcagagatacagcagtgcctttctcatctaaccctgtgtagaatacggctgttgagaatggcgtggctctctggctggatagggttataaaagtaaatcgtcttttcacctttggcttttaataagggaagggtattagaaaaaaagtaatttgtatgatgaagggtgatttgtgcgtgtgtgcagacagacacacatgcagggaggcaaatcagaaccgatgcgtgtttggctttggcttgtttcgctggtgtctggatttacctggcgacacttgttgctctgggggatcttagagggaagcacgctgactgacctagggctgaacagcaggctgacgaccagcgccgcctcccgccccctgctcactctatccctgcaaagcccctgccttgctccctgttcagatcatagtaaaatcggatgtatccgagtatttcagagtgcttgtctccttagagtcagccagtctgacctgtcagatcataatacgtagtagccgtttattttcttttgaaagcaaaatcatggtttcctctctaaataacacttcagcaggaactgtgacatttcccaatctcagttgcgcacattttgtcctaaagacttcttagctcttttactgtcttcagtccctctgcttcacctcttgagtgtgtagtgggattcaggcagataagagggcgaaaggacaattcgtcagagagctctgggtctccatgagggtgggcagtcatcagtctttccctggtccttatcgtagtttgaatttggtccaaggaataagagagacacttggcacagcttccctgccatacccgccagccaggctacttcccatagagcacgttaggcttggccaagtgagatcttcttgtcagtgcttaatccagcctcccgttgtttgtcagccctagctggaggcctcacaggagttcctgtgtccttccagtttgatacgaagtttagaccaagaaaagttcctttctgtggcacacctgtagtctcttacctgtctttggtggttgtacacgaacaggcagatatccacaactgcagaacaagtgtcatcgtctctcttaagaagtttcagggcagcctaaaggctcaccttcaccctaccaggccccctttcatagccaggatcttagggatggagaagaaagataagttcgcctcgttcactgaagtcgccccttgttttcaggttaggaaacccaggttcatgtccaagtccctgggcaagtagccagcgtaactgattgacctaaaacaaaggatggagcccttggggctctgcatagtgaaatgtatgatttcttagtggaaaacgagaaagccactgaggaagcccagaagggaacttagcatatacagccagctttggggaagggggaagcagtgccaagcaagacaggtgcttttcagagacacatgaatctctgtcactcacggatgtactctttgccccaggtgaaagtgacgtcctgcatttcacctccaccaccacgtcgaagaatcgcatcatcataacctggcaccggtaccggccccctgactacagggatctcatcagcttcaccgtttactacaaggaagcgtgagtttctgctttgggtgatgccattctgttgacagggctacgaatgggagaggccagtctttcgatccttgaatgggctggctgaatacagggggtcagcagagtccccagggagagccacgccaaacatccctacttcatcctcatgcaccctctcgggctgtccctgtgatgtcagtcacagccagtgacagccatgattgggaaagtgttagctcgaggcctgtcattctttagtgagtgattagagatgtttgaataaaataaacccaaaatggggaaagcttgctttttccagaattaggtcagtccagactcatgaacgatgatgggggacttcactgaaatatcgtttcagcctccttacctactaggcctactccaggaacaccctgcaggcacgtggctcttttgtatcatcttattcctgtctctctctctgtgtgcctctcccaagctgtggccctctgctctaggtcatgagccttccaaacaagcgaagaaaagtggagagagaacaaccttcatgtcttgagccttttgtgacttctcctagactctgttgggagcttttcctgtgtgatcacatgacattcacccatctaagcagccgaggcttattcctcccgactgcagccctctttgatctccctcttccttcctttgccttctatatccaggtggctaccccggtctacttagccatcccccttacccaggtcccatgttaatcccatagttctctctcccagatgtgtggcttccaaagagcagcaaccagaggcaccttatgacagcatcttgtactctttcctcctgccagagctggggtcctatgaatgagaaattgggtacttaggattactaggctttcagagtttgtacacaggggagcccctcatgatctcccatcccatgacagcagacggtgttttgttcatgtttgtttcagaagccagcggccagcagctgtccagcccttttagctgataaatataaaatacctacccaaccatgcatctgtgcgaagtactatattctctgatagtcacaccagtgctttggcaatgtcagctggtaatttcactgaggacttgatgctggtttctaaggcaatctggaaactaaatatttgaatattataagatgcttaagcatcagaattgtttatgagcaatctgaattttagaagctacttctgtttgtctgtaggaaagtcatttttctccaacagttaccttctttcaatatctgatatttgcattaactgactatgcttgtttttttcttgatgaaaaaatgctgcaatcagaagagagaaaaatagtttttgcatatgttcttaaggaatagtaactattgaatcccagtaactgttgaagtggctcttcctgaggcagaccattcaattctgtaatgcccgactggggaagcccagagtccagtcacttcatttcttcttctataaaagtctaattgattatttgtttatttagacctcccattatagaaagtgtgacatgctgggcctctggggaagatttttgagggttttgatgtcagagccccgaactttctctgaacttaattgtctttcagaccctttaagaatgtcacagagtatgatgggcaggatgcctgcggctccaacagctggaacatggtggacgtggacctcccgcccaacaaggacgtggagcccggcatcttactacatgggctgaagccctggactcagtacgccgtttacgtcaaggctgtgaccctcaccatggtggagaacgaccatatccgtggggccaagagtgagatcttgtacattcgcaccaatgcttcaggtatccatgcctagacaagcccccagcatccacacttcttcacaagctcactggccttgcttgtaccaggtgtcattgtagggttagcagtgagctatgcctgttgtctttcttgtcaataggtaatactgtgtcatattcatttccccactgctaacacattaggctcttctgtgccattttctggcctcggtactatcttccatcatctcctgctttgtgcctgtgagcccaggtcctccagggtgctgggctggtttcattggaaggcccagcctggaaacagccgtcttcagctgcccttgtttcttgtttgttttgatgttcaatcctccaggaactgaaaccatgctgatctgtgttccacttaattcatgtagctcactggttttccatcttcattctggagcttatagagttccaaagaggtcaacaaaagttgaaagcctgcagatgtagtatgttgtggatattcagagtattcactgatgatgaggttcctccttcctttatctttaggttctaaaccatctcatttctcaactccagatctggaaacagtaaaagcaaacgttaatagtttccagtatataaaaactagtttagaagtaggaaaatccacttcagttttaaagacactgattgttttagtgtattggagcttctatcacaaaaaaacagtgtagcctgggtggcttataagcaatagaaatgtatttctcacagttccagaagccacaaagtgcaagatcaaggcgctggcagatttggtgtctggtgagggcccactccctggctcatagatggctgtcttttcattgtgtccttgcatggtggcagggatgcgggagcactctccggggcctctcatagaagggcctggattccattcatgagggcttcactcccatgacccaatcacctcccaaaggccatgcctcctaattccatccccttaggggttaggattttgacatgtgagttttggtaggggacacagacattcactctatagcactgataaacattctttgataatagccattattttagtgggtaaggtgtttttaaatacccataagcgagcacaaaatcagtttaaatggcagagaggagggtgagaagaaaatgctggtggggaaaaccttttgctgtgcacgcctgctccttcctccactcctaccccatctccatgaccctgtaagtggccacagtcatgtcactgggtaaagtgcttattgaaacaaaattggcacaggcttctgatcctgcgtgtgggttggtgtagcagaggttcagtgcaacagaagaagtttttcatcttaaaatttggaagtaacccctggccagcaattcactgtagtgtttgggaaacataggaatatctgcttattgtgacagattctcaagaaacctgtttcctttccgcaaagatggaaaccaggcactgtaccaatgagtcagttcactacgttttgtcctctgtccttacacgcagcggagacagacgagaacttggtcctctgcctctgctgtttggtgacacctatcgtaagaatgtatctaggaatgagctgtttgtttttgaagtacttatttttggaaaccctaaagtggctgagcatcaagtggttgtgttttctctgaaaacgccagtattagtcataacctttttccaaagtatcatcccttaaagatgttcagaaccttgtgtgtatcgtataacctggagcaccctcaagctgtccgcccttttcaagttttaaaaatggcttaggcaaacatattgcttaagtgatatccagtgaaggtgtctcctgtgctttgaaaaaccatcaacattgatgcttttttgtgacccaataaggacaagatttcagtggttctgggatgcatttgatctttatgcacacttcagctctgggtttcagttcaggggtcagcataagtaaagcttgatcagataactatgctttgcctataatcggcattcattctgctggtgacagagtcctttgctcaaaatgaggcttccatgcgtttgcagttctaaactgcttttcagagtcatgcctcagtcattgtactgaaggatgcctgtggaaatggtggacttccgtgttctttgcattgcctctcccccatccctcttacacacagctgtgacatgggcatgcacactccttcacacacacagactctccagccccctttccacttcctctttccatttggcttcatgacatttttatcagagattcaaaatctcagatgaaatccaagtcagcctgttttaccagttgtcgaaattgccggagtgcagcactgtggagaatggcagttgtaataaatgagaaataccaggtgtttgaattagctgtagattttcacattgtctcttctaaccctgcttgtgcccccgcagcctttttccatttacaactcagtaatgtttgttttcacagagattaccggaggaaatagattataaagggaaatgttggcatttatagtagtactatttcaaaataaggttcacttttcactttgtatttcattgttcattgttattttcttatccaggtcaaactggcagtttcctgttggcttgccagagtatctgatagcctgactcttaagttcatttcattttctagaatgttctttgttcccctctccagttccttccattcccttggacgttctttcagcatcgaactcctcttctcagttaatcgtgaagtggaaccctccctctctgcccaacggcaacctgagttactacattgtgcgctggcagcggcagcctcaggacggctacctttaccggcacaattactgctccaaaggtaagggtgcagcagcggcctggacggagggtgtgaccgttcattcctgtggttgtaatgtgcctgagccctaatattacacgtatcagacaacagtgtagttctccattggaaaccagctatcttctggttttttttttttttttttgagacagagtctcactctgttgcccaggctggagtgcagtggcacgatcatggctcactgcaatttctgcctcccaggttcaagcatttctcattccccagcattccgagtagctgggattacaggcatgcactaccatgcccagctaatttttgtatttttagtagagacggggtttcaccatgttgcccaggctggtctgaaactcctaacctcaggtgatttgcccgcctcggcctcccaaagtgctgggattatagccttgagccaccacatctggccgagaccagctatcttcttgattaaaggtactgagagctattatttttccttacaagcatgtataacggctttcattcccactcttgttttggcttttcttttccgagaagacaaaatccccatcaggaagtatgccgacggcaccatcgacattgaggaggtcacagagaaccccaagactgaggtgtgtggtggggagaaagggccttgctgcgcctgccccaaaactgaagccgagaagcaggccgagaaggaggaggctgaataccgcaaagtctttgagaatttcctgcacaactccatcttcgtgcccaggtacccagctcatgtgaaatttcagttggcaaaacccactgctcaggccggttctgttgcctttctccccaccaggtagtgtgtaagtcagcagctggggggtacaatacagtagccactgagacggagccgaaaaagatgacaggttcggtgaagtgagtccctgcggaagccagtcagccctgaagggaacagggaccagggcttgggttgctggggccaccggtgtgacaggtactgctgtctcagccacaaccccccacagagagcaggtgggcaccctgtggtagaggcagggaggggaaactcaaagagtattgacagctgctgcctggtgagaggaaaggccaggatttgggtccatctctgcccttcctaattatctttactgcctctctcagcctcacagaggaggagtgaagcaagagggaaaaaagtcagagtctgtgctggaaagggcctgacttcaaaacatagccaggtgccacaggcatcctgtacaagtaagtttgggaagcagtgtagggcgacagcctgcattggctgtttattccgtggttactctgtctttcaaagcaacacagcccctgccccagggactctgctcctctgctgtggtcttggtttctggggagtggggacaaaagcagaggaaagtaaacgttcatagcaggactgttcatagtagccaaatctggaaacccagtgtacatcaacaggtgagtggctcaataaaatgggctcgaaccttacagtagaatattattcagccataaaaagggaggaaattttgatccatgtcacaacacagatgaaccttgaagacaccatgccaagtgaaacaaggccagacacaaaaggacagatagtgtatgattttatgttgtgtgaaatatatggaatgggcaaatgtatggtgacagaaagtagatttgaatttaccaggggatggggatagagtgtggaggggaatgggaattattccataatcgataggttttctatttggagtgatgaaaatttttggaaatagataatgatgatagctgtaccattctgtgaatgcaattaatgccactgaattgtacccttaaaatgattaaaatggcaactttttatcttacatatattttgttttgttttaaaattttattttaacacaataaaaaatgttaaacaatttttttttcctttcaaaaaaggattagcccagtagtgtgtgggaaaggagatggaagcacagtggtgctccctggccccctcttcctgtaagattatagtgcagattttggaaacgacctcatgcctgaaaactaggccaaggagttggatttaaatcagcatggcacccatgagctgcccatccgcagtccccacagcacccgctgccagcaccccacccagcacgttcccttcccctcactgcccccgaccctgagaggagcctgtagcggctatttattccacagtgactctgctcttacaggctttcttaggctgtaacaacaaatggtttttaaagtgattttttttttctgccaagtgacctttttgatatttgcaaaatggttgaaatagctatctcacttcgagaaatcagtaaagtgggaaataaagactggttagaactggaggcattatttccttttgagagtgcgcctcttcattgcttggtggcttttttctcctcccctcctctctcgaagttcaaaccaccagagcagccaggcgcggtggctcacgcctgtaatcccagcactttgggaggctgaggtgggtggatcacaagatcaggcgttcgagaccagccgggcatcatggtgaaaccctgtctctactaaagatacaaaaaattagccaagcgtggtggtgcacacctgtaatcccagctacttgggaagctgaggcaggataatcgcttgaacccgggaggtggaggttgcagtgagctgagatcgcaccgttgcactccagcctggacaacagaacgagactccatctcaagaaaaaaaaaacaccagagctgtgagaagggcctgcgaggccctcatggcctctcctagcctgccccgctgggggagtcttctgcctgctggtgtgtggcagggctttgaatgtgaaccttgaggttcagtgcccaaggccattttcttatccaggatatctttgtatcactggtggttcctagaaagcagaaagtttgaggactagaaagattgcaaagaggtttggaaactggaactcaatgaggtttggtgacttctctgacatcctaattaattaagaatccgtttgggacctggtcctcattcccacacaccgactcttttccccctcttctcctccattgcgttgcttctcgtggtcctttccacctagaccagcagaggcttagctcgtggcagctcctgctgcccgccacacggaaggatggatttagagtgtcccaaagcaggctgggcgggaagtttgtttttctctatcatgggcccttggttacgttgctgtcttgttccaccaaccagcaggaggttcgggttgtgagtcaaggttttggaaagattttgctgaaaggccccttgctttcagttgtagttacgaggcaagacctgtttttttctcatcagatgtggagcacaaggtgaagtgacgtgaaggcagagctgtgattgacatgttattaatgcacagcattggtggtgttgggttcaaaacaagtttcctgtgttctactggagaagtgtgtttatctgtcccccgagtccttcctttctctctcctaagacaagtccaacttgtgattctctgttttcatggatgtatatgaagacaatattttgtccgtggtgagaggccataatttttaagaagttaatatttgtttttttgcctcctactgagttctggcagagtccaggtgaaggagtgtccagcagagagaatgactgaatcacagaggctggctttctgttttacacgtggattgtccgaaaatggatttgatttctttcagttcattctgagaacaatgtatttgtgggataaaaccagttaagtaagatttagttccttataaattgtccagaatatcctgtatgttttgaagtacagtggaagctagagtttgtaaaacttactagtttctgaagtcaatattcgcagtaaatgcctttctttgactactgtctttattttgtaaatcacatagtttggtttaactagctaaaatgttgacagatgttggaaagtaaaaggttttccaatagggctaggttgtattatgggatggagtggggaaagttggcagtaatgtttgcttttgggcgtacgatttggaaatgtagttgtttaccaaaaaaaatgatgtatgggccattgtgcttcccctgttcctgccttccagataatgttctgtgtcacctccctccccttgtcactgccttgatgtcatcagcattgagagctgtgcagtccctaaaagtgtgatgttgataaacaagtaaactactgagtatacttcatgaagtaatcccagttaaatgggggtgggctgagccgggagaggggttttgacagaattattttgcggtacatcaaacctaagcaacttctgacagacacaagtgtatgttgtgttggttttgaaggtaggcaggaaatttgttgatgatgtgttgacaaagatttccctgacagtaaatgtggtttcttgtgtttttcccttccgggaagcttggttagctagttggttggtttgcagagtgtgaggattgtggatgatcagcctcatgtccttacccttcctcccccagtattgtgaaagcaaatgtacacgccctgaccttgtggttttctgcttgttggaacgagcatatctgtgttgggcagttcatgccttcggtaggacccccgtgtgccactacacaaagaaggaccgtgttttcctcaggggaatccatgggctgagaagactggggagcctcagaggccctttcccaaagccctctgctctccccttccaggttctgacctaaggaccagccagaagcctgccgagcgtcagccgaacctgcaagtggcttctgggctgttccgttccctgcgtgagctttccctctctgctgctgctgccgcgctctcccctccatggcactgatgagcttcccacattctggactttctcatttccctgggcagatagaattcatcccatttgccccctgccttttgcctattcctaagaccggtgaccccagccgaaggcctcagccctgttttctcaccattcgtccatggctgacctgagggttgccctttctccatctgggtgctcctctcgtattctgtttgtttttgttggttcctgtaaacattagaattctgttttaaggtttctagggggagccacaaagcccatttcttcatatttgaccaaagcagcaattagagggtcgcaccctcatgcctcatctgccctttttggtgagaatgtcctttttgtgatgactttatgcactcccttttgcttttcggttgttccaagccccattcaaatccatgacaaggactctgctctctgatgggcaggaccttgatgaggccacaggtgctcactgctgagtgggaggaagcctgggtgggctccagggacctgcagagtgtagcaagcacagacgcttggggttgggggtgggctcgcagcaggagcccccaagaagagagagccctggggtccgtggaactgcttgctgctagactccaggcatctttatttccacagtcagagcaaatccaaggagccaccaccacaggctttcatatccctctgccccaggtctctggggcctctgccacacacctcacctctcccctcctgccctaataaatcttaaccacagctgataggtttgccacctttaaggcttaaccataaggtctgtgaccagatggcctgagtgttctgatgacacagccaggactgcctggccaagagtggcagagacactatttgcctctaggtaaaatcgaagaaccactctgagagccggggggtgggggtgagagtttgtgtgcccattctgacacttgcagagtagagaaagcaagataatgaggaaggacatccctgtgttattcatgagttcttacctaagggggctcaatagctccttctattccatggttaagattcttctgttactcttactcaagtcatagaaaagacaaaagaggtaaaagtacttaaaagccacatttctctcctccttgcagacctgaaaggaagcggagagatgtcatgcaagtggccaacaccaccatgtccagccgaagcaggaacaccacggccgcagacacctacaacatcaccgacccggaagagctggagacagagtaccctttctttgagagcagagtggataacaaggagagaactgtcatttctaaccttcggcctttcacattgtaccgcatcgatatccacagctgcaaccacgaggctgagaagctgggctgcagcgcctccaacttcgtctttgcaaggactatgcccgcaggtatggtatgatccagctggccccattgccaccttcctcacaacctagtggagaagatgtgttttatggacacagggtctgacacccagggccatgacccttagacccaggcctgcctgctaaataacgtgcagtcattggcaggtggcgtgtagaccagctgcccagggaacagagcccacgctctcctagtgacaccactcccagcttggtctctccatagaacgtgctgggagcagggagctgtctgcagggtccaccctccacctgctacttggtgcacatcgtgcattcctgctgtcctttgccccctcttgcgcacaaatcgggttgccccctcctgagctctcacatgtccagagatgtctccagttagttgccttgatccagagtaaacattgcccctcaagatcaactcctggagtagcctctggtcttgcttatttagtctttggctttcccttgttgttagacactgcctgtcactcgggcattcatccatctttgaaggtgggtgccttcaaagacagaacaagagctgccctgtcctttagtaggcctcaggtggtagaaagagcacggaggtgaccagagtctggggtgtggggtcctcctgggtgcagttctggcactgaagtccattgtagcgtgccttgaggcagtcgtcaggctccctgcctcagtttccttagccctcctgggagagacatagccagctaacccctcaagtgccttttccggctgtaactttccatgacctttgcttatcacaactttgtttactgcttcaagaagcaaaagcaagaaaggaaccactgcaaggtcagccagccgctggaggagttggtgccggcagggagggcttgccctgctcttagcaccagcctcctagcagcttcctcacaggccgggctcggggccatccttcgtgcctgcataaaaattgcagttgccgcgtgtagacgcgggccacggagggtccctgtcacagccggcaggccccgtgtcctgcttctgcttactcagcatctttccagggctgcttgtgtttgatggcttcacaaagctttcttttttcaagtggtaggcacagggtagaagaaagttacttaggttgccaagattttcctgctgtgcttggcagcaggctttttttgttgagggactggggagaaaggaggatcttgtggcatcttgagacgtgcaagttttgtggttggtgtattctgaaccctccgctgtgtgagcagcccgctcaggggcagtgtacgtggctgatctccactgtcctgcccgcgtggatgggggggttattctcagtgtacgtggctgatctccactgtcctgcccgtgtggatgggggggttattctcaggtcagcccagtgttggcctccctccctgggaacccaaatccaactttgtcacctgtttaaattgtacagaaggagcagatgacattcctgggccagtgacctgggagccaaggcctgaaaactccatctttttaaagtggccggaacctgagaatcccaatggattgattctaatgtatgaaataaaatacggatcacaagttgaggtaggactggggcagtggcccgtgcctgcatgtacttccatccattgacagcatatgctacctgactgcacaggttacctcctggttagcataggacttaaaacaataaaatccatgccaagttggtgaggatttgggtctttctacccactctgtactctccaaggagtactgcatagtgtgcaaagagctaggctgctttttgccctcaagaaacgatttcattgtgtaagataaccttgtggcataggccaggtcagttctaataacttttaatccttctggagttcttggttacaaaaatgtttggttaaagcttttgggtgtgcttaaagctacttgaagacgaccttttaagatttgatttctttgtctttactgacactcaggatcattgttaggtgggaggtcagatcaggcagctggagtccccagtgtggtgagtttagttggcaggccccagatttctcctgcattcatgggaaattgacatgtatgttttatttccccaggatcagcgagaatgtgtgtccagacaggaatacaggaagtatggaggggccaagctaaaccggctaaacccggggaactacacagcccggattcaggccacatctctctctgggaatgggtcgtggacagatcctgtgttcttctatgtccaggccaaaagtaaggcttgtggagggagaagaaacgtggtaaaactgaaagcagggtggtccaggatcaggacagcccgagtgttcatggctgtcttattttctgttaaaatggagttggccagcttccagaagggtcatgctaaggtgccggcacataccggcactgtgtgtgaaaggttgggcagggcagatgccgagctttgggctcctacctcatgtggcaggaagggagaggatccgagcctctcctttgaggttgtgtaaccactggagagccagaggagacagttgctttcaacctggcttacattcaaagacttttttttttttttaaacaaaagacattttataaagcattgaattgaccattccacctcctacttggtcagtaaagctagatagggctcggattcagggcttgaaatcctaaggggtgtaaggaactccagaggtcatctggttcagcctgctacagggcaggaatctccacggtagcatcgcagaccctccactgtccttttaaagtccccacatgcattggaaatgtacggtgctcaccctttggtacagagactgaggaatgtgagtttatgctcaagtcattaacaagacagaattcttaggctgttctgtgtgatgacttcagattttaaaacaaattataagatgtataagcgcaacaagggccacatacttgttgtttgaccaacaaaacttagtattttggtgaaattagttctgtgttgagtttctgttatttcttatttcaaacccagtttttaagattatttcatgttcatggaatgggatcaaatttggcataacacataaaatagcaatgcagcctcacttagtggtaacacttttgggtctagtgggctgatctttcctggtgtccacatttctgctactcacatctggagttacgttaaaacatgcactccgccgggtgcagtggctcacgcctgtgatcccaacactttgggaggccaaggtgggtggatctcttgaggtcaggagtttgagactagcctggccaacatgggtgaaaccccgtctctactaaaaatacaaaaattagttgggggtggtggtacacgcctgtaatcccagctacttgggaggttgaggcaagagaatctcttgaacctgggaggcagaggttgcagtgagccaagatatgtcactgcactccagcctgggtgacagagcagaactccatctcaagaaaaaaggaaaaaaaacaaaaaacagcgcactcaataggtccagcaatctcacttctagtatatttccaaaggcaatgaaataggtatgtcaaacagctctctgcactcccatgttcactgcagcactattcacagtggccaagacatggaatccacctgatgtccatcactatgtatatgaatggataaagaaaacctggtacatatacattatagaatactattctaccataaattagaaaagaaaaatgtcgtttgtggcaacctggatgaacctggaggacatgatgttaagttaaataagccagacacagaaagagaaataccacatgatctttctgataatgcggaatctaagaagttaagctcatggagagtagaatggaggttaccaggggctgagggtgagggagcagatttggggagatgttagtcaaaggatacaaaatttcagttagataggaggaataagttcaatagatatattgtacatgatgacagtaataatgatgtattcttaaaaattgctgagacaatagattttaagtgttctcaccacacacaaaaaaatgtgatgtaatacatatgttaattaggctcattcagctgttctacaatgtatgcatatttcaaaacaatatgttgtacatgataaatatacaatttttatttgtatattaaaattaattaattttaaaaaagatctccagtagtcacctggtcagcaccagatattctaatctgtttgtgatatctgaaaatcctaatacagacagcaaaagcaggatggggtgaatagaactgcaaatcttgagccaacattttatgtgcctggcactgttcctgggttcaggtttttaggggtaaatggatgtttaggcagataattttgtcaattaaaatagtctgaattgttccatctagtccagttaacctagtctcaccagttagtctatgccacctttgcagcacccagaagcttcataatattcctgcagccttgtccagggtagtggcttgcttgctttctatctttccccagcctccttccctcctctttttcctcccctccatctcctagaaacagatcctagtttgggggtctgtgatctgtgaaacagcaaccttggcttctggggttgagtgaactcagcttgttttggtgacatgacatgttcctgtctgcctttgctgctccatttttaaccttgtaagtgccaggatgccagtgggaaatcgggagtccttctgatagaatttttccagcagatgttatcacgtactgcagggaaattggatctgcgtgctggccttactgttgagaaatttttccttatgtcagacaagactctgtcctgctacagtttagtctcatttcctcttatttaatcctcagaggagatggaaggtttggaagctttcaggcaactgccttccttttaggaactccttgtgtgcctgaatactattaaattactcctcagacttctcttttccagatgaaataatctcaggtcttttggccttttcttgtagcccaatatcatacaccagtttcctagccatttaatcatttttgttattctctggatgtgttccattttctccatgtccctgttgaaatgtgaaactcaaaaagaacacagtacagcctgaccagtagtataagtgatataaacagtgatataagggccttgggggaagaaagaaaaatctgccagctttccgttggtaatgatcacctctgagtgtttttaggaattgcaaaatgctggagcctgcatccattttgagagctacaatatcaataaaaatacttctttcttcgattaaaatacttctaattttaaaaattaaaatagctgtagtagtctttaaagagtaaccatgatcacagttttccatggcaaaataatcattgataggggacttacgattaatgtttacttgatccccagtgattccaggcccatttccacatagacatctgtatttggacgtcccagagaggtctcagattccttgtgccaaaaccaaaatcacagttgttgccctcgaaaggcctcttctctcctttgctccttagctcagtcagtggtcttgtaatccatttgttacccaagccaggaacctcacagcatccttcactcttctttctgttcagccacccctttttcattccaacccaagcctcatggattctgcctcttaaatgtctctggaatccagccctctgtcaccaccagcaccgccacagctcagactccaggtcactcgccttggggggatggtatgagctgtcatactgtatgagcctcatcctggggccatgacttaccaagccagatcatctctgtgagtctgcctggtgtaaagacaaggatcagtgacttctttgtaggtctgaactgggtaatgcagagcatgccctggagacatggcatgtccccccaattctccaagacatgacagtgccttctcttactgccaggtccctccgtctgtcctcagcacagccatttccctggaacgcgaatctgatcagttcactgctgggcctgaaagctttcgctgactccttttaatctgcagaatgagggtgaaactgcttagcttgggctgggtcccttgtgagctggccctgacttctctccagtatcatcattttctaggaaagccatttccccacaacccccaaggaaagcatatcataaacaagttttcccttggggaggttccctcgactcccttctctcctctcccttcctctctgaattgttgccatatgtgaagtccacttttctagttgtcatgctacctgttgacactaatttcccatgtcccacagaatgttccagggtatgggtccatgtgcctggtgcccagcctagcatctgccatacaagtgctggttctgatgatcagtggcttctgtggtcttagacttgtagcaggactcaaatgtctgcagcggcattggaaaggggtgccgtccagtgtgtgcatgtgtgtgtgtgtttattttaaattgtctatggaactatctcaaagattgaggccagcaggacttgacctatacatagatgtagactgtacatagatgtaagaatttctattcattttatgaaaatgaatagaaattttcattctatttattagaaatagaatgcttgctgctgcaagcatttgagtccttttacaggtgtgagatcacaaagaccgcttaccaacagaaccaacacttgtatggcagatgctaggctgggtaccggggacatggaccaaaccctggaacattctgtggaatgtgggaaattagtgtcaaatgtatgcattttcactaacagtcattaaactgcgtacaaagattatttttcttcagtctatcattgaaactattgcaccagaatatactgtactttaaaaaatgagtatatgcctcagtctgcacatatttactcttttttcaaataattgtttgtttgccgtgttctatttctgacaccatttaccttcaggaattcttactgtatgatggggagtaaacgaatatacaggtatttttttcatacttccaactgaatgtgaagaaatgaaatgagcaaattgttcacctggtgatattttatcatttcctcctctttgctgcagcaggatatgaaaacttcatccatctgatcatcgctctgcccgtcgctgtcctgttgatcgtgggagggttggtgattatgctgtacgtcttccatagaaagaggtcagtgatgtgcaaagttatgacactttctgtggctgagtggtttgatgatttgaatgtgagtgaaggtgatatttttgaagatttcaaggaaatattttatggactggaaaacctgattttcccatcaaatgttcttccaggaaaagagaaccttttctaatgattttaacaacagccaaaataatttttcgatggtacagaccttcccctggctggcttttctggtatacagatactgctgctggtgcatacttttccaaacgcgatgcgctagccttcccaatcaaataagcctttttatttccaatgaagtaaagaaacagatgtttcttaaaaagcgctaatctcaggctactgaggaagccagaagatgtgttagcaaatgtctgctggctcacccaggcctgaattgggagtgtagacaagagctgctgtagacagtaagctctccccattctgttctgataccgtgtgagagaggataaatgaaactgttgtagcgaagatgaaagtatatacaggaatgtatggaggtggggttttgttaacgtgaatttaatctttttgacagaaataacagcaggctggggaatggagtgctgtatgcctctgtgaacccggagtacttcagcgctgctgatggtaagagtccgggccaccagcactgccagcgtgcagggcaggtagatcgggagctttcaggagggttgctaatttgggaaaggaaggaggtttgcattattttgagctacctttggccttggatctgtcttcattaatatttctttctttctttttttttttaatcaaagtttttagcagttcagtgaatatgtcaaaacttgtgggactgtatggggtgccccaaggaaacacaggctttagagatgaatgtggccagcgcagtaatcaatttatttaattgcttgagatgttatgctagaatgaaaacagctttttaattgttaacatctagtcagaggatatgctgcagctgacaaaacagtccttttaaactagtttcagcttgagtatcatctcattataattgtctttgatgaattacagctctgcttttttttttatcatggaatttttctgtcattcccttccgactagggtcatacgctcgtggctcattcacattccccttggtaataactaatgagggccattcagttaagtggctgggaaggtctgacatggaagttgggtgatcctcaatggttatttccttttttgctctttctagcatttttatatccagaccttttgagtgagtcggattagggtgaggggttggtcactgagtccagtgatactaggacccttaactggcactttgctaggggcttttacaaacaccatcccatttgtttcttaaacccctgcaatgtgcgttttcttaatgcccatctgcaggtgaggaaatgaactctgggaaaaaacttgtgcaggctcacatggttagacagttgagaagtcaggaggagaatggaatcactgtggaaagggctgtgaggtcccccgggcaggcaaggaaacagccctcaggaggggctggaccggattcatcaaatgaataataaataagtgcatgatgttgagtgagtacatttagaaaaagtgtttgctgtcttcttgcctcgggagaagtgaaagtagatgcaggagatgtgaaataaagagacatgattattctaattattgtgatcaaataagaaaacataagaaaatactttaataatgtgaaaacaccgttatactatgtagggttttactatggtttctttaataatttctaattcagtttatagtaaagtcaatcaaaagcagcctcctctgaatgggaatcaggtgcagaataatgactttatttctatctacataaaggtctcacaaagttggttttttaatagtaatatatatatacatacttctgtagtgtgtgtatataaggcagagagaacattctggacggatgcacaccacacttacaagagttgttacttgtggagaggatctttccctttaaaaaaaaaaaaagccagatgtggtcgaaggcacctgtagtcccagctactcgggagactgaggtgaaaggattacctgagcccaagagctgcagtgagctagaatcccaccactgcactacagcctatagagcgagactggctcttaaaatccagcaagaagatagatatgcattgtttgtatgaataatagcttctaaaaagaaaatcagtaaggaagggagtcatcccagatgatggaattgatagaacaaggcaagaccactttccccctctgtgagggtggactgtgactctacgagagaagctattctgctttgaaatgcggcactagaggttggtgtgtgtagcttttgactgtgaagtgtccaggaagagaaagcatcaatacaacaaattcagattctcagggctctcatggtgacttgaattcacattttgtgtccttctagaatgctttcatgatacgtcttggtacttcattacaacaaaaacaaacttattgccacccaggtcgacaggtgggaacagtgtcaccttatttgaacttaatttattcggcctttgagaagcacttatagccagtttcctcgaggggcaacaaaatgacattgcagttcaaaagtgctttaaaaacttctttttcccaaagctataatctgcatgtcaccattctccagagtacattgaaaatcccctacaggaaagtgctgataacattgtgcacagaaaccgctcctggctggtggcactggggacgcctgcttaaagtcggagccgttgggttgaatcgagagaaaaggattgagcgtattgacttcagggacctcccagggaatgaatgtgattggtttcaactccatgttttatggcaggctaaacagttaattctgattaaaagcaagcctggattctcagagataaatggctggagacagtgaactctttacactttctgaggcgcattgtgaagagccttatctcctgggttgtcttgcatacttactctcctctgacaagcacccgcctcttcttcaggggtgcaagccacctatgccagctggagggcagagttccattcgtgaaacccttgaaacatacgtactatgaaatacaaaaatgtgtaggaaagaaaacaagattattaatgaagttcatattggacacccctcagaggtctaaaatgatggtgcccctcctgggcctaatttataataaacatctctcctttgagacatcacttaaaggttgatagttgggatatggagatgttaggatacagttgtcagcctctcacatccagccacaggcccagggtcagcatctgaaagcatgaaagcaaaaacaggcaccttctccacctcctttctgagccaggaccacctccttcccacagtcagtgtgtggtagagcctggtggcaggtcccgtcaggcaaggacattagcacacagcgtcagaggaattactgacatttcatatggatcttatggaacaggttgattttattttcgtttttaccctacccatttggaggtgtagaattgagcctgtgtttggttttgttttctttctttccaacctttttcctttctttctctttgttttgccttccttcctgcatagaaatatttatttattcattcattcatttttttgagacaggttctcactctgttgcccaggctggagtgcagtggtgcagtctcagctccctgtagcctcaacctcctgggctcaggcgattctcctgcctcagccccctgagtagctgggattccaggtgtgtgccatcacacctggctaattttttaatagagacagtgttttgccatgttgcccaggctggtctcaaattcctgggctcaagcgatcctcccaacttggcctacgattacaggcatgagccaccgcacacggcccatttattttcttaaaccagatcgaatctaaacagaaacagaaactggagaagaaatcctattcaggcttggtatctactgtgcattcctcccaaatctctacccattggtcaaggtccctgagttcacagagcccaggccagagccctggaaacgcctctgcccgtccgctgcctaattgcctgtccacgctgggcaccaccgggtctctccctcagtctcagagctcagttgcttctgcacctcatcagggatccagccatcaaagccaaggctgggggacacttggactagagtaatcctaccaataatgcagttcagctttgtaaccgcaaattttctagtagccgtattttttaaaagtaaaaagaaacagatcaaatgcattttaatagttttttagttccaataatacgtttcgtgtaacccagtatatccaaaatatccattttaacatggagtcagtattaaagttacctaaatatttcactttttttttttttttgtctaatctttgaaatcccatgtgcatgtctcaaattggactggccacatggaatgctcaggagtcccatgtagggaccagctgccatgttagatagcccaggcatagcatctgtgttgagggccctgacacctcttttggattcatccaagaagtaggaccttacgtgcaccatcatcacctctcatatgtgactctggcctttttcccgacccagcataagaactcttccctctccctactactctcctcctttttacatttgcgttttaatctgttggtgaagatgggtaaaatcctgcttgaccatttcattcagtttctcaatcccctgtggttaatttgtttttttcaaaaatgtgtttttatgtgatgaaaagaaatttttaaaaaccaactgctttctttcctatactagacttccttgctttgttctggtccttctatctgttagtatcctcaaattatcttgaaatcctcagagatctgaaatactagtactgactgtacagttttcttactcaaatctatagcatgtggaaagttgacagcaagccatgccatcgcctcctggtattctctgtgggtttaaggaagcagcatcttatattctttggcttagagttcccccaaagcacgttctgtctaagggcttgtttctgtacctgctttaattacggtttcttctccagtgtacgttcctgatgagtgggaggtggctcgggagaagatcaccatgagccgggaacttgggcaggggtcgtttgggatggtctatgaaggagttgccaagggtgtggtgaaagatgaacctgaaaccagagtggccattaaaacagtgaacgaggccgcaagcatgcgtgagaggattgagtttctcaacgaagcttctgtgatgaaggagttcaattgtcaccatgtggtaagagaaagttcctgaaaagccaaaatgcagcacagggagagggtatcacacaagcctcccagtatgttcttggctgcatgtacccgtgggtttggtgtcttgcctttgccttctggatagttaccccattacctcactgctaccttcagacccctgtgctcagaccaggccgcagcaccacagagacagttccagacaacacaggcaccagcaagggccaccctgaccctctgagtctttctctttttgattcctcccaggtgcgattgctgggtgtggtgtcccaaggccagccaacactggtcatcatggaactgatgacacggggcgatctcaaaagttatctccggtctctgaggccagaaatggaggtcagttttcatttccaccggtattgcatgttgcctggcctgctctcttttcctttataatctccctgcaaggaaatgctgtgtctttaaatcagtttactttccagcatccagtgtttcttactgcatgctcagttgtaggtcatttatgcaaaggatttccccaactagagtcagactctgatcttcgtgaggggaacttcctgttccttggatcccctctgctaagcccctctgtgcctttgttcctgcattccctccacccccagtcccctccccacatcagtgtccacctgccaagccaggccagcgccactccctccccgaagctttcctgccccactccagtagctatctcctctgctaacttctcgatgcgcttgactcacatcctcgtatgtgttctctctcgttatgttgtgttgtgctgttgttggagtgtgtcccccctccaccccgttgtgtttagcttttcatctcagtccaagtgtgtggctcagggccgcatttgtggcaggcactctgtcaataaatgtatgttacagttcaaggttaagctgcctggattcttgcccttgcatctgggaagttgctgggtgatttcccacccagctccgtgcgcaagatgtgcactcattcataaaccccctccccacacacagtccccttccccggcattgttggcggtccttgtctttgccactgggaatctggtttcctcagactctacgtccacgtttcaggattgatccagagtcagtgtcctgcttacgcttttgaatgaatgatcccacctcagctgcaggatttctgcttagtttcctaaaaatttcactttgggttatgagcttccaattctaaacctgctaaagtcctatgcaatttttcattaaaagtcaccgtggtgtctcccccctctgtagtattaacccacaggccagctttttaacatatgcgggcatgacttttgagtaattaattctacaaataaactgggagataaatgctgagacataaagccagcaagaactgagttttcatttggttgcctccgtgggtctgaagtctttgacccttactttgctgcttactgggtaagcagtgtgtctgcttttattccttagaagcagtgacttccccttctcggcccctttggaaattcttttgctgttcttcatttgggcttaatttttttttttttttaatgttctttgaatcggcaacttaatcatctcccaagtgacagtttcttaattttagttccaaacacctgttcacatatgacttcatgtatttgcagcacatggtgtttggggccaagtgtggactggggcttcaagcaggatggtttacaaaactcccaccctctgttctgccaagcattggtccccagcacccctgggtgttagtgcctcttcctggttcactcactcactttctctggccctctctgtgtctctctcactctctttctttcgagatggagttttgctctgttgcccaggctggggtgcagtggcatgatctcagctcactgcaacctccaccacctgggttcaagcgattctcctgcctcagtctcccaagtagctgggattacaggtgtgcaccaccatgcccacctaatttttgtatttttagtagagacggggtttcaccatgttggccaggctggtcttgaactcctgacctcaggtgatccacccacctcagcctcccaaagtgctgggattacaggtgtgagccgctgcacctggcccttggttcactttaatacacaaaacagcatgaaggagaaaagcttgatgaaataggtgactggagatctggcagagtatttcttgccagcatcgattgaggcacctctgaaaagtccaaaactcactcccttcctctccagtttcaggcacagaataaaaattcagaacacatggccttggtcctggctctgtggctggctgcctgtggtcctcagacagctgctgcaggttcctgggcctcagtgtcctcaatataaaataagagggtgggacaagattactgaagtccctttcagaactaaaattcacctttagattggtcagatttaaactttttctttctagctcatgtcaggtattaaaatgtgtgcacttaccctgcagtttcattatattcaacctgctcccccgaccaagtttcacttacgtatctcactacgagtaggtgtatatgtatacttgtcttaaatagctctaaccaaattaaaggaaagaatggcagtgtaacaccatgaactgacaaaatttcagccctctgtctttctccatgcttaaagttgagtgcttttgttgattctgttgctcacggcaattataaatgaccacttcataacacatataggtcatactgtaatatttaagaattgtgagcataaactttacatttcatgtgcatatttcctcatgcatcacacgtatctaaagccctgaaaagtagtgatttggacttacccccagtgacttaatgttgcttccccagataaccacgtgataagtgttttaagtcaccaagagacagctttgacagcctgttcagaattcaaaggtttgtgtcaccaagtgtagagaaccaacccagaagtaccgaggagttgttataatgattccaaatactagctttcagtagaaactagcacctcacagggcagcagccagcatccactgggcattgactatgtgccacgcaccactgggcactttctgtgcgtggccccaggtcatcttctcgtcagtgaaaccactgtgataccccatgtggaaaagcctgggcatgctcagctggtggccggcctgcaagtgtgggacctgtcagagccctatggctttgcagtgctgtgtgagatgctttgtggtcaagaaaaccaaggtgtagagtctgttgcacttgtatatgcaaaagtaaaaggtaacattaaaattagggactagtgattgttttaggatggagagacttgggcatgtgttttatataaaacttttttctaaatggatgtattatttaagggtaattctttttaattccaaagccagcacgttgctgtcctctgcaaagaggaatgcttatccctgttacttattcctggtttcctccaagactagtttcagctggacttcagttgccaaggacttgtcttctgtaatgcccacagaaaataataatgccacattgtaaggtgaaaacagtaatcctggtatttttgtattttagaagaaggttgaagggaaagaaaaggattaaataatttataacgatgcttttatgggaaataaaatataccatgtccatttggaaacacatttgcttacttccacacagcctttgtaacgtgctctccttcctcttacctgtacttcggtgatggaaataaaaggaacatataaacaaataggaatttgagtaactgagaatccttactaccaaaaatggcttgtttcactttaaaaaaatgttgccctacccaaaatagaaaatgttggtcctaaagagtgcaaattggtgtttccctcaccagctctgatgtggtcagggagcaagtgcaaataagcttgcggggagcaagcaggtgccatgctctccatgatggtttgttccttccgagcaagtcctggtttcttagcataaacaacccacggtgcccagattgaacaaagatgatatgcaaacctcgaaagaaattggcatggaaaaaaaaaatccaaaattctcatgtgaatttttttaaatctccaacagaataatccagtcctagcacctccaagcctgagcaagatgattcagatggccggagagattgcagacggcatggcatacctcaacgccaataagttcgtccacagagaccttgctgcccggaattgcatggtagccgaagatttcacagtcaaaatcggaggtgtgtccttagctttccaggtctgggcaagaactaaactcaggtgttttgaggactttgttggcattagtctgcccctggagaggttttctagtgtgtcccttgagtgcacggactccttcttgggaatgatgtgattgtctccagttgatggtcacaaacctggcacggtcggtcccaatgctgatagctcatggacatggtggttcagatactgggcacggtccctgaggctggctctccagacgtttgaggcatttcttggtagaacacctcttagcattggttacagaaataattaagacaatgtcttcaggagattttgacttgggaataaaactcactgtccaaccttgcattcatccctccaattttcctagcttttaaggagcattgctccccttccagggacccacattggtttctaagaggcaagctgccctaatgacgaagcctctgcacggagcaggagcagtggcaggagctggcatggcagtcccttaggtgagggacgatcactgctcactgggtttcacggctggggctggccagcctccaagctctcgaccactctctcacaacacttactgtcctgctcttagctcaccagcctactggttagactcccttgttgccaccacccactgtcacaccagaaaaaagggttggattgaatttctgagcaatggttaaaacccacttcagcctttaggtttgtgtttttacttcggtcttttaatctgcctaataaaaacacacataacatcagggctgctcaggaaaccacctgcttttaccaggactctcatcttcccactatgatacaatgatagtttagaaaaataccaaatatttatcctgagaaactgcaggggagatttaacacccaaaagaagctatttcaaatggacctctgtgtctagttcttgaactgccttttctggaagtgttcaccttcctttagtaacatatttttttcctttagtagtgatgttttaatgaaatgttttagcccctttggtgaacaatgagaatcttttagagaacggtttctttttttgagacagagttttgctcttgttttccaagctggagtgcagtggcacaatcttggctcaccacaacctccacctcccaggttcaagtgattctcctgcctcagcctcctgactagttgggattacaggcgcgtgccaccacacccagctgattttttatatttttagtagaaacaggttttcatcatgttagccaggatggtcttgaactcctgacctcaggtgatccacgcacctcggcctcccaaagtgctgagattacaggcgtgagccaccacacccagctgagaatggtttctaaagtaggggtgagtgtctttctttttactctgtaggagctagaggtattgaaatggaaccatatcccagagcccacatccctccgtcatcagagttcctcattcaggatccaccagtgtgtccctaggtttggcacgttgagacgtcctcacgtttggtgctctgtgaagctgggcagccctcagagaggcaaagaagtcccaagaggccgtcctgcctcagggctctcaggaaagagccgcccgcgtccctggctgggcttccttggtgcacccagctcatttctccttccctctctgtagaactcacattgtccccatggaaatgccagccagctcccctttcccagtgcaggggggagccaggtgggcctgaggtgggccagttctgccgctaatgggtgagagacttgggccaggtgccttacatccgggagcctcagtttcctcacctcggaaatagggtgataatgtaacagaccccatggggttatgagaaggacttggtgcaggaaagcagcagcacgtgcctggcacagggcagggcctctccagatggcagttcctgtctgtgtcttattcccaccctccgggcacatggggggaactcagtttctccccactgcgcgtcaccctgggagaggtgttttttgtgccaattgccattttaaatccaaatcagcagggatcatgtttgctgttcaaccatgtggcatatttatagtgattttttttgtaatcatggtttttctttctggaatttcaagtttttcatttgtgctgaggaaggtcgtttgtgttttttaataggattccttcttttccaccttgtgcaagtaaaggcaaatcccctatttgcatgtcactgtattaattcacagataacactttcacacttcatttttattcttctcaagggctcaagatgttttcccaatgcccagcgtctcatggatgacaaatatgacaagtaattttaccagaggcagtttgagggctcttagcatagcacaagtaaattatgttggttcaagtccaaggaactttgttctctttgtgtttgcttttgtagccttacctctttggggcatgagttagagacatacatgagcattttaaagtggagcagccctttctcctgggaaggagaacggaagagtccacttaagaaaaggttgtatgattgagtgcaaaatcaaaatctgacaaagcagcaataatttaggattataaagcgagcctgccatcaaacataattatgtggcatcttctggagacatggaaaatggaagaaattttcaaaaatgagtgggaggattatgttgaaaaacagtattgagtaatagcttcaggggcctcgtaaatagcatcttttcggcatcttactgggtacttttgtcatcatgaattgttaccctgaatattttcccccttattaagcagtgaaattatttacttttctccagtggtggggcagtgctaccaagttaagtaagcatctgtactctcctgtttatttggtcaggttttaaaaccatgtgtaaatgaccagtggtctctgcagtactatatattttcttaaattgtgggactctaatttttacaccgcttccttttttcttatttttattttcaagacaggttctcactctgtcacccaagctggagtgcagtgttgtgatcatggctcactgcagcctcaacctccagggctcaagtgattcttccaccttagcctcccaagtacctaggaacacaggcgcacaccaccactcacaactgactaatttttaaaattttttatacagacagggtcttgctgtgttgcccaggctgatcttgaattcctgggcacaggcgatcttcctgtcgtggcctcccaaagtgctgggattacaggcgttgagtcactgcgctcagcctgcctctcatttaaatgcaataagggcattaacttcctaagggaatcaaattgtaaatatattaaaagtggagattgcttggtatttgctcatcatgtgattaatcatcccttactgtctccaccttataaaattgcaaaccctaatatttggccaccttaaagtgggacgtgtctgtgtcttgccttgcgtctctccacacataatgagtgtagggtcctctgctgtgacagcagtggtgcctgctccagcgtgtgactctgcgccctctcttcccttacagattttggtatgacgcgagatatctatgagacagactattaccggaaaggagggaaagggctgctgcccgtgcgctggatgtctcctgagtccctcaaggatggagtcttcaccacttactcggacgtctggtatgagaacctttactgcattgccagcctggagcccccagcctctgcactttccaccagctcagtctctagggctttatctttctctgttcattgttacccgttgccagctttagctcagtgttgtgtgagccacacttcttcatcattgaggtgttcctgttgtcagtgggctagctaagggcagaagggcattcgtgggattttaaagaatttatgggaccaacattctttccgccttcagcagataccgattatgtttccaggaggtgggatgtgccagaagccgtcacctctttttgtttctcccctgcctgccttctttctcttttcctctttctcaataaacagatactgtctgtgtgtctgcctcacctaatctaaccctcagattgcagacagtgctttatttagacccaaagcttatgagtcctgattgtgttttcctgctggtcccatctgctgtctgtctttcagtgggcatccaccgttgtggacccagggatggttatgggaagcaaaacgtctcccttaatcataaacagtgtctaccagtggaagcccatcgaccgagggatcagaggcctctcagtagtattgtttattgcagttccttggcaacattgcagagaggcagtcaggttctgaaatacaactgaggttattggcaggctgaggccctggcacaggcaccttctagaatatcagctagtgtcttggctttcctctggggggatcccgttgctgttgtgttacagaaatggtagttgtttactccaacagtctggatgaccgcatagaggaactatttcaatagtgactgacatcattttttttttaacctcgtaaacctttcacagttcaggggccttggatcttattttgaagacaggtgcaaattggaaatagcatttgaatatgacccggcaaagcatgattgcttcttaagctcaagtatgagatctgttttgcaatcagcttgtccaagatggttatctcttcactgtcaaatcaaagtgctctgcatggtgtttagagattgggatggtgaggagagagcaagcctgggtatgtgcatgcatctgtttattctaggcttcgtgcctccaggagcttggaggtcagcttgtagtataataaaatagaaaactatacagccggggagaacagaagcagaatagaaggataaagtgttgttcatatctctcaggcaaattttacccaaattctgacgagcagttactgcacaagcaacaacaaagggacctagagtgtgttcattgccaattctgtccatttggctacataactactgtgaaccaatacaaaaagatatgtataaacatgaataggcgtttggtattcattccatgaaatgctcaggcattgacagcgcttcaggttttgtttgctttttaacacaggctttgaggatagcacaggtcaggaaggctagggcgttggagcaggtttctcagcggtccaggctctaaactaaagctgtccctctcaaaagaatggaaatgatttcagattgtattcagcagcacgaagcaatgattcctaaatagttaaaaatctagaaagaaacactaagaattgtattgggctttgtagaagagaccccagaattttaggatttgggatgtatccctgcagtcaggcccagtccccagtgcacctgcagatctttgacagctgctggttgagcttctgctaagaggtttccttccagggactccatgttcactgcctcacaaaggcaggccagcctcatgctttagacatccttgctcttaacaaatctttcgtgttctgctacgtcagcctctgtgtgacacccattggaccttctctctgtagcacaattgcataccttgctctgttcttgataagataggtctaggagtcatcgaagaggtgtgtctgttctagccagaacacctccaagtttcctgctgtcttccaggacttcattcccaggcccttgggcactgtggctgctctccctgcagctccctgtagcaccatgtccctctgaaatgacaagggtgccctctaggcatggaggaaaccagacgaaggactggggagctgcaccccacagcctagagctgtgcttcttcccgagcatctggatcacccaacacataatctttattttttattaagaagctttccaaatagtcacaaatagccaaggttatttgcttctttcatgactaattaccatctgtggggaatgtggatttctctgtaggttttaatttgctggtgagtgggccattgctaccatcccctcctggtgtggggaagtatagttactgaatgctgcctccagccagcacgggcattgcagggggactcacagccgccggtcttccccctggggaaacaacgtcaaggttcctaattagaaagggctttacacagagacatgtatctactgtttgaagattaaatctgtccatgaaatggaagacttgattttatatgaagtcatgaagagccaacaccacatagtaaaataccggctttgaaaaacacagaggtgttgcatatttctcggtgcttctgactggctgtgtggccttggttaaacctcagagcttctctggccttcggttgctccatctgtaaggcaaggtctgtctcgagaagtctgcggtacctgaatagatgttgaaatggctcctgtggcaactggtattgtgtagagatggttcagtgtccacaccttgcagttgtcacattaagctgtgaaggacgactgactctagcactcagtggtcctcagtggcaggtgatgttgacctcagacaagagttgctcaggagataggctttgcagttcacctcgacaagcgtttgtggagagctaggtctgctacctcctgtatcgttgcctgtgggtgatggtaaggctcttgggggtgtggaagatgcggggatgatgatgatgacgatgatgacgatgacgacgatgacagcgtcgtcgtcgtcctggtcctggaaggataaagtcttgtggagaagaggaggcaattctgacagtttggggttgcatcatcttcttcacagaagagatgaagttgtgtaggcaccctaagtatggattgtcacaaaaagagcactaggaagcggggcggggcggggcaggggtggggggttcctggcagtgggaatgctgggcaggcatggcagtagggagcacctgctgcaggtggggttggtgaggtttcctcgtgggacttaggctgcagagagatcaagacaggcctcagctgttgtattaggcatcctggactaattctttaagccctgttaaggtttctgaaccagagggtgattagagctgtgcttgaagttcttgttagccggagtatacagctgcattgagcaagatgttgtaaccaaaggagaggtggtggtgggccaggcaagcaggatcctgcacactcagggagctctgagggacggaaggagggtgccagaccttggacagatgtgagcctgggtggacagttcgcagtgggactccgaggaggccaagggcatgggtgacagcaggcagactgctcgggtggaatgggcatcagctgcagggaagccgggggaagaacagggcacaaatcagagttcagtgtgagacgcagtgagtttgtgggtagcccagtaactgggaacttggaatggagcagttgggccgggagggccagggtgggagccgtgccgtgagaactggctgcctgcaagccgctgacacagccaggaagggcacgtggggcaagaggagaagtgggtctgggagggagccacatcctcaggccatttcccagaccagcctgcagtcagcaaaagcagagagctagtcatttcttcttattttatttttaattttttgttgttggagagctagtcatttcttgtaccaagctgcatttcagatgtgtgggtactactgccactggcatctgaggcatgctgcctgtatggctgggctggttgtggaaggcagagcttcccgcacaaagctgatggagagccccttctcccctgggcccaggcctctctaaactgcacttttggcctctgggtgtcttgtacaacatgaagacgacagcatttcttggtcacttgtaattaaaaaggaccttgggttggtctgtcctctgattgctaagattctatttctgtctaacatctacttttagtatcaatttgtacaaaaatctttgattcaccgaaagtagctgaagcagcgaataaaacgttctcatacagtcaggagcactgtgggcttgggcacaaggtcaaggtcccaagagctcttggttggaaatctcctgccccaggtttttccatgtggcttgaccagcacctgcagcccaggacaggtccagctagaatccctgctccccaccctgctcccgcccctacttggtgatgagtagcctattttactccaccaaagtgaaccacatggaaaggcacacaggtcagggagaatttgtgaattacggaatttgccctgggagggcacatttgttttgcagattccagcattgtcttttttaacattctgtctgaaagttgtgtgtgtactctctgttttgttttccagtggtttgatcttctaaactggcaaagctgcatgcatatggcagaattgctcactacaaagttattcctcagccaacttctctgcttaaggattctttgtccatgataccccctcccagccagtgcagcccaccctggtccccccacctgtgacacagaggccctgcaggccagcagctccccagctctgttgtgggtgggggagcagcaggagttctcttctcccttggcccaactggacctcaagatccctatagatcttctaaacattccaggtcccaggccctcaccccagaccaatcaaatcagagtttctattgggtgcccagccctctgtttaaaaacctccccaggagattctcctgtgcagccggcagtgagaaccacctgggtagaggtttccaaaattgtctgattgtaaaaatcacctgaggagcttggtaaagcttgactgtcccaggcctcatttgaggctactaagtcaatgtccaggctggggcttggacaagaatgtcattctttttgggtcaaagccaggttaggtgataccgccttgccagataaatggccgggactaggtagatgctgaacccagtatgctctgcgttcaaagcacagatcaggggcttcctgaccgtgcaagggatgccggaagcgccctcaccaccttccttagctccaccaccggggctgaatttagtttacggggaacattagcagcaacagagggaggatgatatcccgcacttagcccagggcctggctcgctgtctgacaagcactgtcaccatagtaaggacagtttatctgctcgggatgtaagaagtgctggaaaggagggggcagcattgttcagtccatccctttccaagctcctcacagtttttttctccctgtaggtccttcggggtcgtcctctgggagatcgccacactggccgagcagccctaccagggcttgtccaacgagcaagtccttcgcttcgtcatggagggcggccttctggacaagccagacaactgtcctgacatgctgtacgtacttcctgggccctccgtgctcttctgagttctcttctcaaatacctgttttcttgggtcacaggagattaggagattaaagccattctctctggtcctgcacctcccttgccaggcgtggctaagaggtttgtccttgtggaaggagctgagtgggttggtcgacctgtgcttttccgtgggtaccttaattctaccccatattccgtaatgctttcgttccgatttgcagttcacactgtagtttctcaggccaaatgtctctgtgaaatgtttggccagagtaatccatccttactcatcctctccatgtgaggtttttgtttctttttaaagaaggctacaacacaacacatactactctgaagtcgaattcaagagccccgcgccccacctgtggcaggcctgagggagccgccgcagtgagtgtgcacacagctgcatggccaggactccggcatgcaccacgtagggtcagcttggtgtcttctgaaccctgccccacatgtcttctctgttaagtgtttacaaaagtcataaaccatctaagtaacatgctctccggagcttcatccgctgaccaatgtggacctggagcgtgtgtgagctgacatccctgcggacagaaggatgccagtgctggtgaatttgtcttctcactgcacttttttttttttttttttgagatggagtctcgctctgtcgcccaggctggagtgcattggcgtgatcttggctcactgcaacctctgcctcccgggttcaagcaattctcctgcctcaccctccaaaatagctaggattacaggcacccaccaccactcccagctaatttttagtagagatggggttttaccatattggccaggctggtcttgaactcctgacctcagatgatctccccgcctcagcctcccaaagtgctgggattacaggcatgagccatcgcacctggcaaccccacttattttgaaaaaacactttgcagcttttagtcctaagttttgtcagatgacgagagagagtttgtgatgcctcacagtgttggtgaggcctctctgctcagcgccccctggagaagccccccttttggtggaggacttgctctgtgtccgtggacggtgctgttttgtggctcagtggaggtcagagctgctggagcagggaggccttgttgtccttcctggaatgagtttgaggagggggtgaaggtgttccagttcagtcatcaggtgcacaacaggtacaggttgggagcagtggccttgcttttgacatgcactttaaggcaggcttcagagattgatctggatctccatagctgaacaggaaggtgggctcccactagtatctcaagaccaattcaggagatttccagaaatgcttttcaggacaggtttggcttcattttggaaaggatcctgaggaattgctgggctgttatgtctgcatgaaggcacccagctcctatctctcacccatccacccccctggagccagcacagactcaggctgggcccacagtggcgggataatagatagatatgaaccagacatgtgtcaggtggacaggagggaatgagggctccagcagccacaaaagttttgctcatttggtctcctacagtgtctgtgggccaggaatccagatgcaggtgttcttgctctcagctcagagtcacaggaggcagaaatcaagatgtcagtggggctgcagtctcacctgaggctcagggacatcttcaggctccttcagggttctgcacttgcaggactgaggtccccatattcttggcacctgtcagctggggactgctttcaactcttggaggccaaggccactcacagtccttgccatatacagcctccataggccctctcataacagcagcctatttcttcaagactgataagaggacagctctctactgcttctactggttttttacctgataaagtcagatctacccaggatactctctcccttttaagtgattcacagtcaattgatgagaagcctgattagaggagtgaagtatcctctcatgttcacaagtcccacccgtactcaagtgaggggattatatgggatatttacaccaggggcaacgatcttggggggcatcttagaattccatagtctcagaaatcattgtccctaatcaaacaatcaaggtgctatttttgtttcaaagcactttgagtgttgctacaaatactgaatccctaagctccttgtaaatggccggccagcggagggcatggggtggggaagactggatacacacccctgtgctctgggagtacgttggctgggcggcatgctcattagctgctgcttccgaacataggttcagctgaagtgtatcccaggcagtggacacttcgtgtggaattcagaaaggtggcgcaggaaggataccagggaaagccagagtgaaggcatcacccttgcacagctagcacatgtgggggctcccattgtcccatcaaggcagggccagaaccagaaagtcggctggtgccctgggcctgggccagtgatgggaggctcctcttctctgagggtggcacctacagatgcagtggcactgggtttcctggagccctcatcaaggaaacttcccagcatggcctcttcagaactccacaatccaaacttggaagagactcgaaagaccacttagtaccttttcttgcccagtatagaaattcttcttctccccttctgtgttagttttttatcgcagtataacaaactacccaaaacctactagttaagagcaacagtaaacatgtattatctctcagaggtttctgaaggcgaggaacgcaggagcggcatagctggctggctctggcttggagcccttctcgcggttgcagcccagctgtccgccggggctgcagtcatctgaaggcttgcctgggggaggcagacccacttccaaggtgttgctgcataggtagtatgccctgcatgaatcgccctgttctacgtgggcctctccgtagcactgcccaagtgtctcaggatgtgtagctggcttctctgagtgcagagttcggcacactctttctctaaaaggccggctaaaaaaatgtttttggctctgtgggcccatacgaccttgactgtgactactggactctgccactgtggagcaaacacagctgtgggcgtcacataagctagcgtggctgtgttccaatacagctttatttttaatactggaatttgaattccacatcatccctgtgttgtcacaaaatattcttattttgaatttcttttagccatttacatgaaaaccattcttagctcatagaccttggaaaactaggcagcaggccagattttacccacaggtacatagtttgcctgctgtgccctagagtaaaagatccaggacctgagcagaaggcacgacgtcctttctgaccaaacctcagaagtcacactgaggctctcaccttctccttcaggttacaccatgtgagagtcaatcacgtggggatgtgagctccaggacacaggggagaggaccactggggatccgggagcctggctaccccccagtaccccaccaacacacacacacacacacacacacacacacacacacactgcccctcacaggtgaccatctgctccacactttgagcagcgcagccactgttttcttgccagccattatgagaaaaatcatgctttcaagtctgaatataagccatggagtaagaggtctgatgaccactgaatctgcataaaggtacagtgctagaatctaggctaatactagaactggtggtattttagcaagcttagaaacagcccatgaaagcaggtgtgagttctgcttctgtggtttagggtgggtgagggagagcggtattgttctgtgctttctctttgactcgggtaaacgtttatctacaagagacttgtgggattcttacttggtccacctccaggtgactgggcttttactattaatgtaaactgcctgggacgcagcccctgccatgggaaacgcagggcacttcctgttctcagcatagagtgacaaggaaatttactcagagcggttactctgacattcaatgtttagttcaggaggcatttctgctttgccatcgagaatttttctcccttctaagaaaatgttttctcctgagaaaatttttctcccttccaagaaaagagtagaatgaaaggaggcaacttggtttcatagggagtgtcatgttgtccttctgagtttactgatgagcttacctgagaaaggagggttctagcatgggagttctgttgctacaagacatgaaagaatggcctccgtttatcccggagaggagagtccctgagcccttgggagttgccttgaaacctctgccgggtcccaggtgagaaagtgtgtgagttgtgtggttctgagatctgaacaggcaccatctggtgacactaggggctgaaggagctcggtggctgcaggtggactggagctcaccatcaggaagtagccagattctcacccctcagtgtcaccgagtgttctggctttagaggaaggactccgtggtccccaagccacaaggtgtcgaggtctgagtctcaacgccatgactcagtgtgaattaacttagcaggtatcacaacatcagatttgggttgtggttccctgctgggtctgtactttagattgatgacaaagcccgtcctcagccttatttcagcccagatctcggtatttatgccacagatactgttgagctcctctgggtgcgtgctgaccctgaggtcacacagatgagccaggagtggccctggctttcaggaaacgtagtgacgtaaaaggtcccggctgctgcgggataagggccagggcagaggtgtgaacgcagccgtggaagacttgggccaggaagccatttgttctgctgctaacacttccacagctccacgtgtccagactgttgccagagacgtctttggtctacaggattcaggagggaatctgaactttagcctggagcattatcaactcatagatgagtctgaaacaaacttagtgaaatctgatgttttttgtagttttccagtacagtttttcccatcgctggaatcctggtttggttctgcgggaatcgagtgcttgagtgggacccagacagacaggaagggcgctcctgctcagttagccccagtaagctcactgaggcacacaggccccatgtccacagccgctcctggctgaggcgtggttcctaagacgacccttactgttgagggctgccaggagggagagacacattcagccccgcaggtcctctgggaatccggtgagcgtcggcaccgggctggggccgtgctgattcccggcagcgtgtgggaatgtgcgggtgcctcgtggcctgctgacatcgcacacaggtcacagcctgtccagttcaggacatcagggccaagagtgaagtgagaatacggaggcacctctgtgtgctcaccctgctgaccgtcacccagcctccggggggggtcacagctggcccccaggaagctgcttcccagcagggcaggaattccatttgagtcttgtccctgttccaggagaagggctgggtatgtgtcccccaaaggggagagcattcgagaaggatggcgccagcctccccagaactgacctgtggttaaaaaaaaaaaaaaaaattgtgctttttaaaagatgagttttatcagctcacacatccttctagagtctaatggagattttttgtgtgtgtggaaatagtaaacaaggtcttgaatcccacagagcaaaaaagacttcctttcatgggcagcactggaagggttgttactctggaatggtttaaaagaggcgtcacatggcttgtttgtgctgatgtcactgcctcgctgctctcctgtggcacctcctcggtccctggccacagggcacagagccaagcacatctcatgctcttggcccagttacgcttctgcccaggggtaagtcagctggagaggaattcacagcccaggcatttcatgtcgttatggcctattttaatttttttaaccccaatcatttttcttaggaagtgatggggagtttggaaaggcaggcttatttgtcatcaagctgccagcttttatcaatgcaaaccacatccctgtgacatctgtgactgttccttggacagttaggtgagggagggtctcctggtggccccagggttactcttatttaggttgagaaaaattcctttttccaggatcgttggtgatcaaagtgtagtcattctgttgcgcagagaactccatcccagctccaccctcatgaattttgtaatcttggacaaattatttagtatcttagtgcttctgttccctcatctgtaacatgggggtatattatagtcagtagcacctgcttcacaaactcgtgaggacttcagcagttcacacacataactgcctcgctgcctggcacctagcgtgcacatggcattctaccgtggggtagacttttaaaattctggctacagagatacttttccataaaagtggccacatggaactctccaaatctaagaagcatactgtgggggccttcatattttgtctaattcttttctccccagaacaggaacctgcacccttccttcttttaaagggcgacgtggtaaataaacatttttagacttgcaggccacagtctctgtcctaatgtcctcagctggtagttgtagctggaaagcagctgcagcccacatggaaatgagggagcgtggccccatgccagtgcagctgatgtagaggcgggcagccccgggttaggccctgtggagacgcaggcccccgggctctagaacgctgaattctagtgaattctggatggctctccctcacacccaggcccaccctccctcaaggttgcaccttctccacctgaaggaagctgccaggtggccataggagcccttctcttggcaggccagcttccaggcccagtggcttctcttacatcaggggcctccccttggaatgttccctgaaggccagacacgggcaggtagtctgtggtcaagcagccaccctgacaggaggctagatgccactgggtgtgctttgagtttcctagatgtggagagttctgtgtggccacttttatggaaaagcatctctttagccagaattttaaaataaagaggataacttcctggtgagaacagacgtggaaaggaaggcactttggtttcacgctcatgtaagagagggctgttggcggtcactcctcagaactatggccagccctggatggtagccagctgctttttgccccaaaagtctgtttagctgggtctctgcattctggaagcttgtcaaagcccgggcctttcctgggtcagggcagccggctttccttgtccacgtgtggccggctgttttcttggggagccccggccacagccggcaggactccctttgctccatgtgactctgagggcctcacaggtatttgcagcccaggtgctgtcggagcccagccgatgcgaccgacacacagcacaagcgtcatcctgttctgcctgtcccttgcgtgtggaggggactcgtgcccagggctctccttgctggcttgttggaatctggcttcaggtctacacggggcctctcgtttggtccagaacagcctggctcatcggctggggcttgcttgtgcagggctggagcgagcacgtgctagatggagacagcagactcggagtgtgcatttcttcgtgttgcaagcctggcctcacagtgccttcttcctttggttgtctgccaggggtagccctgcaccaggaggaagcttagaaatagcacaggtgggaaccggagagagagcactgttggggaagctgcggtcactcatcagccttcctggtgagaaaccaggggtttcctgctaattctggaaaggatgtttcagcagtgcctgcatgagacgcctcagatagaaaactggttatttttgtttcttagcactgccaccatagataacagctgtcacgatggacagtgtggacctggattagtccttcttgggaaaggagagtttgggttttgtaccgtggtggttctgggttctgggggaagagaatggaaccgtacgaggtaaaacaggagactctgaaggccacttggccatccaggcagaaagccagggatggagaggggcagcagggctgtgttcagtgctcccgccgtacgcttgtatgcgggaaaccactgcaggcggcccatgaagcctcctggccatgtgcgccctcccggtttggaccccctcccgtgtgtcttggctgcaggtttgaactgatgcgcatgtgctggcagtataaccccaagatgaggccttccttcctggagatcatcagcagcatcaaagaggagatggagcctggcttccgggaggtctccttctactacagcgaggagaacaagctgcccgagccggaggagctggacctggagccagagaacatggagagcgtccccctggacccctcggcctcctcgtcctccctgccactgcccgacagacactcaggacacaaggccgagaacggccccggccctggggtgctggtcctccgcgccagcttcgacgagagacagccttacgcccacatgaacgggggccgcaagaacgagcgggccttgccgctgccccagtcttcgacctgctgatccttggatcctgaatctgtgcaaacagtaacgtgtgcgcacgcgcagcggggtggggggggagagagagttttaacaatccattcacaagcctcctgtacctcagtggatcttcagaactgcccttgctgcccgcgggagacagcttctctgcagtaaaacacatttgggatgttccttttttcaatatgcaagcagctttttattccctgcccaaacccttaactgacatgggcctttaagaaccttaatgacaacacttaatagcaacagagcacttgagaaccagtctcctcactctgtccctgtccttccctgttctccctttctctctcctctctgcttcataacggaaaaataattgccacaagtccagctgggaagccctttttatcagtttgaggaagtggctgtccctgtggccccatccaaccactgtacacacccgcctgacaccgtgggtcattacaaaaaaacacgtggagatggaaatttttacctttatctttcacctttctagggacatgaaatttacaaagggccatcgttcatccaaggctgttaccattttaacgctgcctaattttgccaaaatcctgaactttctccctcatcggcccggcgctgattcctcgtgtccggaggcatgggtgagcatggcagctggttgctccatttgagagacacgctggcgacacactccgtccatccgactgcccctgctgtgctgctcaaggccacaggcacacaggtctcattgcttctgactagattattatttgggggaactggacacaataggtctttctctcagtgaaggtggggagaagctgaaccggcttccctgccctgcctccccagccccctgcccaacccccaagaatctggtggccatgggccccgaagcagcctggcggacaggcttggagtcaaggggccccatgcctgcttctctcccagccccagctcccccgcccgcccccaaggacacagatgggaaggggtttccagggactcagccccactgttgatgcaggtttgcaaggaaagaaattcaaacaccacaacagcagtaagaagaaaagcagtcaatggattcaagcattctaagctttgttgacattttctctgttcctaggacttcttcatgggtcttacagttctatgttagaccatgaaacatttgcatacacatcgtctttaatgtcacttttataacttttttacggttcagatattcatctatacgtctgtacagaaaaaaaaaagctgctattttttttgttcttgatctttgtggatttaatctatgaaaaccttcaggtccaccctctcccctttctgctcactccaagaaacttcttatgctttgtactagagtgcgtgactttcttcctcttttcccggtaatggatacttctatcacataatttgccatgaactgttggatgcctttttataaatacatcccccatccctgctcccacctgcccctttagttgttttctaacccgtaggctctctgggcacgaggcagaaagcaggccgggcacccatcctgagagggccgcgctcctctccccagcctgccctcacagcattggagcctgttacagtgcaagacatgatacaaactcaggtcagaaaaacaaaggttaaatatttcacacgtctttgttcagtgtttccactcaccgtggttgagaagcctcaccctctctttcccttgcctttgcttaggttgtgacacacatatatatatatttttttaattcttgggtacaacagcagtgttaaccgcagacactaggcatttggattactatttttcttaatggctatttaatccttccatcccacgaaaaacagctgctgagtccaagggagcagcagagcgtggtccggcagggcctgttgtggccctcgccacccccctcaccggaccgactgacctgtctttggaaccagaacatcccaagggaactccttcgcactggcgttgagtgggaccccgggatccaggctggcccagggcggcaccctcagggctgtgcccgctggagtgctaggtggaggcagcacagacgccacggtggcccaagagcccctttgcttcttgctgggggaccagggctgtggtgctggcccactttccctcggccaggaatccaggtccttggggcccaggggtcttgtcttgtttcatttttagcacttctcaccagagagatgacagcacaagagttgcttctgggatagaaatgtttaggagtaagaacaaagctgggatacggtgattgctagttgtgactgaagattcaacacagaaaagaaagtttatacggcttttttgctggtcagcagtttgtcccactgctttctctagtctctatcccatagcgtgttccctttaaaaaaaaaaaaaggtattatatgtaggagttttcttttaatttattttgtgataaattaccagtttcaatcactgtagaaaagccccattatgaatttaaatttcaaggaaagggtgtgtgtgtgtatgtgtggggtgtgtgtgtgtgagagtgatgggacagttcttgattttttgggttttttttcccccaaacatttatctacctcactcttattttttatatgtgtatatagacaaaagaatacatctcacctttctcagcacctgacaataggccgttgatactggtaacctcatccacgccacaggcgccacacccaggtgatgcagggggaagccaggctgtattccggggtcaaagcaacactaactcacctctctgctcatttcagacagcttgcctttttctgagatgtcctgttttgtgttgctttttttgttttgttttctatcttggtttccaccaaggtgttagatttctcctcctcctagccaggtggccctgtgaggccaacgagggcaccagagcacacctgggggagccaccaggctgtccctggctggttgtctttggaacaaactgcttctgtgcagatggaatgaccaacacatttcgtccttaagagagcagtggttcctcaggttctgaggagaggaaggtgtccaggcagcaccatctctgtgcgaatccccagggtaaaggcgtgggtcattgggtttgctccccttgctgctgctccatccctgcaggaggctcgcgctgaggcaggaccgtgcggccatggctgctgcattcattgagcacaaaggtgcagctgcagcagcagctggagagcaagagtcacccagcctgtgcgccagaatgcagaggctcctgacctcacagccagtccctgatagaacacacgcaggagcagagtcccctccccctccaggctgccctctcaacttctccctcacctccttccctaggggtagacagagatgtaccaaaccttccggctggaaagcccagtggccggcgccgaggctcgtggcgtcacgccccccccgccagggctgtacctccgtctccctggtcctgctgctcacaggacagacggctcgctcccctcttccagcagctgctcttacaggcactgatgatttcgctgggaagtgtggcgggcagctttgcctaagcgtggatggctcctcggcaattccagcctaagtgaaggcgctcaggagcctcctgctggaacgcgacccatctctcccaggaccccggggatcttaaggtcattgagaaatactgttggatcagggttttgttcttccacactgtaggtgaccccttggaataacggcctctcctctcgtgcacatacctaccggtttccacaactggatttctacagatcattcagctggttataagggttttgtttaaactgtccgagttactgatgtcattttgtttttgttttatgtaggtagcttttaagtagaaaacactaacagtgtagtgcccatcatagcaaatgcttcagaaacacctcaataaaagagaaaacttggcttgtgtgatggtgcagtcattttactggaccaacccacccaccttgactataccaaggcatcatctatccacagttctagcctaacttcatgctgatttctctgcctcttgatttttctctgtgtgttccaaataatcttaagctgagttgtggcattttccatgcaacctccttctgccagcagctcacactgcttgaagtcatatgaaccactgaggcacatcatggaattgatgtgagcattaagacgttctcccacacagcccttccctgaggcagcaggagctggtgtgtactggagacactgttgaacttgatcaagacccagaccaccccaggtctccttcgtgggatgtcatgacgtttgacatacctttggaacgagcctcctccttggaagatggaagaccgtgttcgtggccgacctggcctctcctggcctgtttcttaagatgcggagtcacatttcaatggtacgaaaagtggcttcgtaaaatagaagagcagtcactgtggaactaccaaatggcgagatgctcggtgcacattggggtgctttgggataaaagatttatgagccaactattctctggcaccagattctaggccagtttgttccactgaagcttttcccacagcagtccacctctgcaggctggcagccgaatggcttgccagtggctctgtggcaagatcacactgagatcgatgggtgagaaggctaggatgcttgtctagtgttcttagctgtcacgttggctccttccagggtggccagacggtgttggccactcccttctaaaacacaggcgccctcctggtgacagtgacccgccgtggtatgccttggcccattccagcagtcccagttatgcatttcaagtttggggtttgttcttttcgttaatgttcctctgtgttgtcagctgtcttcatttcctgggctaagcagcattgggagatgtggaccagagatccactccttaagaaccagtggcgaaagacactttctttcttcactctgaagtagctggtggtacaaatgagaacttcaagagaggatgttatttagactgaacctctgttgccagagatgctgaagatacagaccttggacaggtcagagggtttcatttttggccttcatcttagatgactggttgcgtcatttggagaagtgagtgctccttgatggtggaatgaccgggtggtgggtacagaaccattgtcacagggatcctggcacagagaagagttacgagcagcagggtgcagggcttggaaggaatgtgggcaaggttttgaacttgattgttcttgaagctatcagaccacatcgaggctcagcagtcatccgtgggcatttggtttcaacaaagaaacctaacatcctactctggaaactgatctcggagttaaggcgaattgttcaagaacacaaactacatcgcactcgtcagttgtcagttctggggcatgactttagcgttttgtttctgcgagaacataacgatcactcatttttatgtcccacgtgtgtgtgtccgcatctttctggtcaacattgttttaactagtcactcattagcgttttcaatagggctcttaagtccagtagattacgggtagtcagttgacgaagatctggtttacaagaactaattaaatgtttcattgcatttttgtaagaacagaataattttataaaatgtttgtagtttataattgccgaaaataatttaaagacactttttttttctctgtgtgtgcaaatgtgtgtttgtgatccattttttttttttttttttaggacacctgtttactagctagctttacaatatgccaaaaaaggatttctccctgaccccatccgtggttcaccctcttttccccccatgctttttgccctagtttataacaaaggaatgatgatgatttaaaaagtagttctgtatcttcagtatcttggtcttccagaaccctctggttgggaaggggatcattttttactggtcatttccctttggagtgtagctactttaacagatggaaagaacctcattggccatggaaacagccgaggtgttggagcccagcagtgcatggcaccgttcggcatctggcttgattggtctggctgccgtcattgtcagcacagtgccatggacatgggaagacttgactgcacagccaatggttttcatgatgattacagcatacacagtgatcacataaacgatgacagctatggggcacacaggccatttgcttacatgcctcgtatcatgattgattactgctttgttagaacacagaagagaccctattttatttaaggcagaaccccgaagatacgtatttccaatacagaaaagaatttttaataaaaactataacatacacaaaaattggttttaaagttgactccacttcctctaactccagtggattgttggccatgtctccccaactccacaatatctctatcatgggaaacacctggggtttttgcgctacataggagaaagatctggaaactatttgggttttgttttcaacttttcatttggatgtttggcgttgcacacacacatccaccggtggaagagacgcccggtgaaaacacctgtctgctttctaagccagtgaggttgaggtgagaggtttgccagagtttgtctacctctgggtatccctttgtctgggataaaaaaaatcaaaccagaaggcgggatggaatggatgcaccgcaaataatgcattttctgagttttcttgttaaaaaaaaatttttttaagtaagaaaaaaaaaggtaataacatggccaatttgttacataaaatgactttctgtgtataaattattcctaaaaaatcctgtttatataaaaaatcagtagatgaaaaaaatttcaaaatgtttttgtatattctgttgtaagaatttattcctgttattgcgatatactctggattctttacataatggaaaaaagaaactgtctattttgaatggctgaagctaaggcaacgttagtttctcttactctgcttttttctagtaaagtactacatggtttaagttaaataaaataattctgtatgcatttctgtctctggtttggttttgtccctcctggaagcatcactacactttggtggcagggaagctgagctatgtggggcacgtgtgttcacgcatgttgcctggaagcgttctccagaaaagcattgcctcttctctgacagctgagctttctcagcatgcaaattgccagtaaagacgacagggaagctatctgtttctccctccattaaatcatctggaaagaaatttgaatacataaattacgaaactctgtactgcagttccgactgatttgtagacttttttcctataccttccactaacaacagtcaggccaaggcaagtctgatctgcatgaccccaaggcagaggacttcagttcttcacatttcccatgtgctttttggtctttcacagctgacatgcccacctcggggggatgctggtgagaacccagtgggcctcacgcagaatgtgggtcactggaggagctccaaagtcctagttactttctagctgctgctcagtgatctctgtctgcccctagggaccctacaatgtaaacattatttttgtcaggggaaatggcatgtatggcaaggtgtgttctagaatcagactaaggattcagacacatcaggcagagaagctggtcatttccttcaactttatcatgggaaattatgctccaatagcaaaatcgggccagtagaagaagagctgtccagcaatgtataggtagaagtaaaccgaagaccatggttacttcagacctgttgagcctcagaagtgtttgcacctaaaagcaaaggcctttctgaaaggggactctcagctggggtgcggtggctcacgcatgtaatcccagcactttgggaggctgaggtgggtggatcacatgaggtcaggagttcaagaccagcctggctaacatggtaaaaccccatctctactaaaaatacaaaaaattagtgggacatggtggcgggtgcctgtaatcccagctacttgggagggtgaggcaggagaatctcttgaactcaggaggcagaagctgcagtgagccaagattgtgccactgtactgcagcctgggtgacagagtaggactctgtctcaaaaagggtactcaagcttggcattgcttcagggttactgctcagtgttgtcaccgagtgcctggcactcaggggatcttcattaggtgactgatgatgaggaggtctcaattctgaggctggaaagcccaacagggcctcctccttccctggtcaggtagatgctgcccttccaggttgccacagtgcagtctgcacttggcctgcccagccagaaggagcagcaatatctaaggatgaaggtgctgggtcttcagaagcattagaacctttcccctccaggccatttcttaagactgcaagccctcaagagctatttctgcatttaccccccaagtccaggtatgagtccatactcactcagatgtgtgatttttgtagtgttctaatgttgctaaaaagaccttcacatccattctctcaccagatgttcacaatcaccctgcaaaggaaggattttaattactcttacagatgagcaaacatacaggcatgctcaagacccctcccccgcccccccacctccccaccagctaccaactcaggactcagcctctcagccttttctgctgtggttctcaatctggcttcagcactgccagaactaagcaggctctgtgcatactgacaagggatgctgggtgaagtacacagcccaggtgtgaatgagacttctggggttctccctggagaacttcaggggccacagcggggggaaatgatggggaagttcttgaagagggagctctgggcctcccaactggataatatctaaaaatttaaaaaatgttatggcatgctgccaggcagtctgaaatataacactggagcccagtcctgggggccccttgcttgccagtgtcctgggacagaattgcccatagcacagacagatctccacattagcaaccatgcagccagacctgtgcacaccgcccagcaccacctccccccatcccccaatatgtgggctttgatctgttttctagcaaatgatccaggtgtacttgcaaagggagtcccctaaaggctactccaaatgcaaaaagcgtgctggcggccttgactgcttcctttggttttcttgtgggtttttgtttgtttttttttttttttttttttgagacacagttttgttcttattgaccaggctggagtgcaatagtgcaatctcggctcactgcaacctccgcctcctgggttcaagcgattcccctgcctcggcctcccaagtagctgggattataggcacccaccaccacacccggctaatgtttttgtaattgtagtagagactgggtttcacatgttggtcaggctggtcttgaactcctggcctcaagtgatccgcccacctcagcctcccaaagtgctgggattataggtgtgagccactgcgcctggcctggttcctttgttaggaagctgcaaatgcttttcttaatagtgaatgaatccaaacactaactgatgaattttttaaatgtagtcaagtgaaaaatggtagttgtaagcacaccaacgtaacaagaaatttcccagagctcacctaccttcactcacttcctccaaaaaaaaaaaaaaaagcgatgttaccaatgggactcccaaaggaaatctgcccctagaaaacactgaacaggtagaatcttgctgggagaagcttggcacaagacccggtgctgtgtcataaaagcaaaacaaaacatgaaacagaaaggagattctgcttttaaaaagggaagacaccatggagagaagctaagcccggctattaacctgcgccttcaaaccaaacactaccagtgtgactgtaaaatggtgcagcccctgtgcaaaacaaaatggcagttccttaaaaaattaaacacagaattagcattgaatccaggaattcacctctggagattgacctgaaagcaaggactcggatacatatttgcacgccagtgtttgtagcagcatgatttgcaagaaccaaaaggagcaagtaacgtaagtgttcatctacagctgaatggatgaaatgtggtccatacatacactggaatattattcagccttcaacagaatgaaatcctgtcccatgctacaacatggatgaacctggaggacatgaggctgaaataatacgccagatgtagaaggaccagcgccgcatgactccctcatatgagctacctacagtcagattcatagggatggagggtggagtggtgagcaccaagtgctgggaggaagaaggaatagggagttaataggtacagagtttcagtttgggatgaggagaaagttctggagatggatggtggtgatggttgtacaacaaggaaatgtactgtatactactgaactgtatgcttgaaattattaaaatgagtagtaaaaggggcaaacacagagacagagaaatcatacagtagagcctcggtggcttcgaggctacccaggacctggacacacaagctcaaaggccaggaatggggtccctggagcagcggctgtctctgtgcttctgtaagcatctccaaaacaggtctgtggtccccacagtctgcgcaggatcacacagacccactgtgtagatttttggaagaaaacagatgactcggatttcattttattgtcatgaaaaccataactgaagctagttcatcccctgtgaaatgtccacctttcagagtgttctttctcctgacaataaaataaccctttgtgattttgttgggctaattcagagttttccaccctctttgtcttacaagcaatttttgaaaaagtttctcaatgcacagttgagtgctacatacaggattgaaacattcaattttctctagaggagcaatcccccggtcagttccctttggctggaaggaccatggttgagttttctt

SEQ ID NO: 1030 - DNA, 5232 bp, Homo sapiens
ttttttttttttttttgagaaaggggaatttcatcccaaataaaaggaatgaagtctggctccggaggagggtccccgacctcgctgtgggggctcctgtttctctccgccgcgctctcgctctggccgacgagtggagaaatctgcgggccaggcatcgacatccgcaacgactatcagcagctgaagcgcctggagaactgcacggtgatcgagggctacctccacatcctgctcatctccaaggccgaggactaccgcagctaccgcttccccaagctcacggtcattaccgagtacttgctgctgttccgagtggctggcctcgagagcctcggagacctcttccccaacctcacggtcatccgcggctggaaactcttctacaactacgccctggtcatcttcgagatgaccaatctcaaggatattgggctttacaacctgaggaacattactcggggggccatcaggattgagaaaaatgctgacctctgttacctctccactgtggactggtccctgatcctggatgcggtgtccaataactacattgtggggaataagcccccaaaggaatgtggggacctgtgtccagggaccatggaggagaagccgatgtgtgagaagaccaccatcaacaatgagtacaactaccgctgctggaccacaaaccgctgccagaaaatgtgcccaagcacgtgtgggaagcgggcgtgcaccgagaacaatgagtgctgccaccccgagtgcctgggcagctgcagcgcgcctgacaacgacacggcctgtgtagcttgccgccactactactatgccggtgtctgtgtgcctgcctgcccgcccaacacctacaggtttgagggctggcgctgtgtggaccgtgacttctgcgccaacatcctcagcgccgagagcagcgactccgaggggtttgtgatccacgacggcgagtgcatgcaggagtgcccctcgggcttcatccgcaacggcagccagagcatgtactgcatcccttgtgaaggtccttgcccgaaggtctgtgaggaagaaaagaaaacaaagaccattgattctgttacttctgctcagatgctccaaggatgcaccatcttcaagggcaatttgctcattaacatccgacgggggaataacattgcttcagagctggagaacttcatggggctcatcgaggtggtgacgggctacgtgaagatccgccattctcatgccttggtctccttgtccttcctaaaaaaccttcgcctcatcctaggagaggagcagctagaagggaattactccttctacgtcctcgacaaccagaacttgcagcaactgtgggactgggaccaccgcaacctgaccatcaaagcagggaaaatgtactttgctttcaatcccaaattatgtgtttccgaaatttaccgcatggaggaagtgacggggactaaagggcgccaaagcaaaggggacataaacaccaggaacaacggggagagagcctcctgtgaaagtgacgtcctgcatttcacctccaccaccacgtcgaagaatcgcatcatcataacctggcaccggtaccggccccctgactacagggatctcatcagcttcaccgtttactacaaggaagcaccctttaagaatgtcacagagtatgatgggcaggatgcctgcggctccaacagctggaacatggtggacgtggacctcccgcccaacaaggacgtggagcccggcatcttactacatgggctgaagccctggactcagtacgccgtttacgtcaaggctgtgaccctcaccatggtggagaacgaccatatccgtggggccaagagtgagatcttgtacattcgcaccaatgcttcagttccttccattcccttggacgttctttcagcatcgaactcctcttctcagttaatcgtgaagtggaaccctccctctctgcccaacggcaacctgagttactacattgtgcgctggcagcggcagcctcaggacggctacctttaccggcacaattactgctccaaagaagacaaaatccccatcaggaagtatgccgacggcaccatcgacattgaggaggtcacagagaaccccaagactgaggtgtgtggtggggagaaagggccttgctgcgcctgccccaaaactgaagccgagaagcaggccgagaaggaggaggctgaataccgcaaagtctttgagaatttcctgcacaactccatcttcgtgcccagacctgaaaggaagcggagagatgtcatgcaagtggccaacaccaccatgtccagccgaagcaggaacaccacggccgcagacacctacaacatcaccgacccggaagagctggagacagagtaccctttctttgagagcagagtggataacaaggagagaactgtcatttctaaccttcggcctttcacattgtaccgcatcgatatccacagctgcaaccacgaggctgagaagctgggctgcagcgcctccaacttcgtctttgcaaggactatgcccgcagaaggagcagatgacattcctgggccagtgacctgggagccaaggcctgaaaactccatctttttaaagtggccggaacctgagaatcccaatggattgattctaatgtatgaaataaaatacggatcacaagttgaggatcagcgagaatgtgtgtccagacaggaatacaggaagtatggaggggccaagctaaaccggctaaacccggggaactacacagcccggattcaggccacatctctctctgggaatgggtcgtggacagatcctgtgttcttctatgtccaggccaaaacaggatatgaaaacttcatccatctgatcatcgctctgcccgtcgctgtcctgttgatcgtgggagggttggtgattatgctgtacgtcttccatagaaagagaaataacagcaggctggggaatggagtgctgtatgcctctgtgaacccggagtacttcagcgctgctgatgtgtacgttcctgatgagtgggaggtggctcgggagaagatcaccatgagccgggaacttgggcaggggtcgtttgggatggtctatgaaggagttgccaagggtgtggtgaaagatgaacctgaaaccagagtggccattaaaacagtgaacgaggccgcaagcatgcgtgagaggattgagtttctcaacgaagcttctgtgatgaaggagttcaattgtcaccatgtggtgcgattgctgggtgtggtgtcccaaggccagccaacactggtcatcatggaactgatgacacggggcgatctcaaaagttatctccggtctctgaggccagaaatggagaataatccagtcctagcacctccaagcctgagcaagatgattcagatggccggagagattgcagacggcatggcatacctcaacgccaataagttcgtccacagagaccttgctgcccggaattgcatggtagccgaagatttcacagtcaaaatcggagattttggtatgacgcgagatatctatgagacagactattaccggaaaggagggaaagggctgctgcccgtgcgctggatgtctcctgagtccctcaaggatggagtcttcaccacttactcggacgtctggtccttcggggtcgtcctctgggagatcgccacactggccgagcagccctaccagggcttgtccaacgagcaagtccttcgcttcgtcatggagggcggccttctggacaagccagacaactgtcctgacatgctgtttgaactgatgcgcatgtgctggcagtataaccccaagatgaggccttccttcctggagatcatcagcagcatcaaagaggagatggagcctggcttccgggaggtctccttctactacagcgaggagaacaagctgcccgagccggaggagctggacctggagccagagaacatggagagcgtccccctggacccctcggcctcctcgtcctccctgccactgcccgacagacactcaggacacaaggccgagaacggccccggccctggggtgctggtcctccgcgccagcttcgacgagagacagccttacgcccacatgaacgggggccgcaagaacgagcgggccttgccgctgccccagtcttcgacctgctgatccttggatcctgaatctgtgcaaacagtaacgtgtgcgcacgcgcagcggggtggggggggagagagagttttaacaatccattcacaagcctcctgtacctcagtggatcttcagaactgcccttgctgcccgcgggagacagcttctctgcagtaaaacacatttgggatgttccttttttcaatatgcaagcagctttttattccctgcccaaacccttaactgacatgggcctttaagaaccttaatgacaacacttaatagcaacagagcacttgagaaccagtctcctcactctgtccctgtccttccctgttctccctttctctctcctctctgcttcataacggaaaaataattgccacaagtccagctgggaagccctttttatcagtttgaggaagtggctgtccctgtggccccatccaaccactgtacacacccgcctgacaccgtgggtcattacaaaaaaacacgtggagatggaaatttttacctttatctttcacctttctagggacatgaaatttacaaagggccatcgttcatccaaggctgttaccattttaacgctgcctaattttgccaaaatcctgaactttctccctcatcggcccggcgctgattcctcgtgtccggaggcatgggtgagcatggcagctggttgctccatttgagagacacgctggcgacacactccgtccatccgactgcccctgctgtgctgctcaaggccacaggcacacaggtctcattgcttctgactagattattatttgggggaactggacacaataggtctttctctcagtgaaggtggggagaagctgaaccggcttccctgccctgcctccccagccccctgcccaacccccaagaatctggtggccatgggccccgaagcagcctggcggacaggcttggagtcaaggggccccatgcctgcttctctcccagccccagctcccccgcccgcccccaaggacacagatgggaaggggtttccagggactcagccccactgttgatgcaggtttgcaaggaaagaaattcaaacaccacaacagcagtaag

SEQ ID NO: 1031 - protein, 1360 aa, Homo sapiens
MKSGSGGGSPTSLWGLLFLSAALSLWPTSGEICGPGIDIRNDYQQLKRLENCTVIEGYLHILLISKAEDYRSYRFPKLTVITEYLLLFRVAGLESLGDLFPNLTVIRGWKLFYNYALVIFEMTNLKDIGNLRNITRGAIRIEKNADLCYLSTVDWSLILDAVSNNYIVGNKPPKECGDLCPGTMEEKPMCEKTTINNEYNYRCWTTNRCQKMCPSTCGKRACTENNECCHPECLGSCSAPDNDTACVACRHYYYAGVCVPACPPNYFEGWRCVDRDFCANILSAESSDSEGFVIHDGECMQECPSGFIRNGSQSMYCIPCEGPCPKVCEEEKKTKTIDSVTSAQMLQGCTIFKGNLLINIRRGNNIASELENFMGLIEVVTGYVKIRHSHALVSLSFLKNLRLILGEEQLEGNYSFYVLDNQNLQQLWDWDHRNLTIKAGKMYFAFNPKLCVSEIYRMEEVTGTKGRQSKGDINTRNNGERASCESDVLHFTSTTTSKNRIIITWHRYRPPDYRDLISFTVYYKEAPFKNVTEYDGQDACGSNSWNMVDVDLPPNKDVEPGILLHGLKPWTQYAVYVKAVTLTMVENDHIRGAKSEILYIRTNASVPSIPLDVLSNSSSQLIVKWNPPSLPNGNLSYYIVRWQRQPQDGYLYRHNYCSKEDKIPIRKYADGTIDIEEVTENPKTEVCGGEKGPCCACPKTEAEKQAEKEEAEYRKVFENFLHNSIFVPRPERKRRDVMQVANTTMSSRSRNTTAADTYNITDPEELETEYPFFESRVDNKERTVISNLRPFTLYRIDIHSCNHEAEKLGCSNFVFARTMPAEGADDIPGPVTWEPRPENSIFLKWPEPENPNGLILMYEIKYGSQVEDQRECVSRQEYRKYGGAKLNRLNPGNYTARIQATSLSGNGSWTDPVFFYVQAKTGYENFIHLIIALPVAVLLIVGGLVIMLYVFHRKRNNSRLGNGVLYASVNPEYFSAADVYVPDEWEVAREKITMSRELGQGSFGMVYEGVAKGVVKDEPETRVAIKTVNEAASMRERIEFLNEASVMKEFNCHHVVRLLGVVSQGQPTLVIMELMTRGDLKSYLRSLRPEMENNPVLAPPSLSKMIQMAGEIADGMAYLNANKFVHRDLAARNCMVAEDFTVKIGDFGMTRDIYETDYYRKGGKGLLPVRWMSPESLKDGVFTTYSDVWSFGVVLWEIATLAEQPYQGLSNEQVLRFVMEGGLLDKPDNCPDMLFELMRMCWQYNPKMRPSFLEIISSIKEEMEPGFREVSFYYSEENKLPEPEELDLEPENMESVPLDPSASSSSLPLPDRHSGHKAENGPGPGVLVLRASFDERQPYAHMNGGRKNERALPLPQSSTC

SEQ ID NO: 1032 - DNA, 1765 bp, Homo sapiens
attttatttgtatcaactcaaagcaaaatagagcattttattaaatatgtcttcataaattacgcacagtaaaatcccattaattggaccacacccagttcattatagtgtttattataattttagcattagttgaactgaaaattggtttttgtttactatgagaaaaaggtagactaaacaagatgaaacctgttgtttgcatattatgtttgtacatctttattagcaactatttttccaactattttcaactatttttccaactattttctagttataaaagcaatacataaatactatagaaaatttagcaatgcagaaatgaatttttaaaaatccctcatagatagccattgttaacattttggtgtattttcttcaagtcttagtaaaatggaacctttaaatatagatccctgtatcttaggaattagaaaggcagcaaaggcagttcctaatgagatggagaaaatgttgatttagtcatgcccttgtactgtgggggccatactgtctgttgacagagcatattaaaagacgttccctacattcgtcagccttagctaattggcagtctggtatttatgattttatattttgttaatcagcttgggagctgcagtaccccccagcctcctagaaacttggcttcccctgcctgggaggcctcgttccaggagtcgttgttgagagtcaagccagggaagtgtgtttttgtcagggagcagccagtcctgtgctgggagcatctcagggggcacctgccgttgaattgttctcacttgtgtttgtaagaatccaagtatgtcacccttacaccaagtgagcacacagtgacacaatcccctttcaatgtagataacattgcttcagagctggagaacttcatggggctcatcgaggtggtgacgggctacgtgaagatccgccattctcatgccttggtctccttgtccttcctaaaaaaccttcgcctcatcctaggagaggagcagctagaagggtaagtgccccaaatttcatgagctgacgttctattacaaaataagcagcgtgcttatgaaactgtgttgctgaggtaagagccctccctgccttgttaaagagaagaaaggaggaagccgcagtattgcctgtgctgctcgagtaggtcttgggtggagtcatggttctccattcttaggaggttgctgtttggaaaacagagatgttatcacccttactggattttgcctcatcagtcaagggttgcgtgtctgactgtgaccagtgagacggcagacgggggtgcgcttagggcttttctgccaagaatgacagcagttggtctggagtgctcacctccctgtgaaatcattgttcgcgcgaccctcatctgcctcaggatgctgtactctactacgcacaactgctccatcttttaagatattggaagtgagagcacgggaggagcatgggcggttcgttttgttagaaagaaacccggattcacgagatggtttttattgattagtttacaggatttgcactattgatagagtttttgccttggcacaggcctgctttgtgataggggttttaaaataaccgtgggcttttcactggaggataaaagccggtgcttattgcatgcacaattgctttccagccgtcagcctgtgtgtacctttgcatatgtacttttctctttaaactctcccttttaaatacgactcttgccaggctttaagtgaatgcttcaaaataaaaggagttatcaatt

SEQ ID NO: 1033 - protein, 34 aa, Homo sapiens
MTAVGLECSPPCEIIVRATLICLRMKTTHNCSIF

SEQ ID NO: 1034 - DNA, 5229 bp, Homo sapiens
ttttttttttttttttgagaaaggggaatttcatcccaaataaaaggaatgaagtctggctccggaggagggtccccgacctcgctgtgggggctcctgtttctctccgccgcgctctcgctctggccgacgagtggagaaatctgcgggccaggcatcgacatccgcaacgactatcagcagctgaagcgcctggagaactgcacggtgatcgagggctacctccacatcctgctcatctccaaggccgaggactaccgcagctaccgcttccccaagctcacggtcattaccgagtacttgctgctgttccgagtggctggcctcgagagcctcggagacctcttccccaacctcacggtcatccgcggctggaaactcttctacaactacgccctggtcatcttcgagatgaccaatctcaaggatattgggctttacaacctgaggaacattactcggggggccatcaggattgagaaaaatgctgacctctgttacctctccactgtggactggtccctgatcctggatgcggtgtccaataactacattgtggggaataagcccccaaaggaatgtggggacctgtgtccagggaccatggaggagaagccgatgtgtgagaagaccaccatcaacaatgagtacaactaccgctgctggaccacaaaccgctgccagaaaatgtgcccaagcacgtgtgggaagcgggcgtgcaccgagaacaatgagtgctgccaccccgagtgcctgggcagctgcagcgcgcctgacaacgacacggcctgtgtagcttgccgccactactactatgccggtgtctgtgtgcctgcctgcccgcccaacacctacaggtttgagggctggcgctgtgtggaccgtgacttctgcgccaacatcctcagcgccgagagcagcgactccgaggggtttgtgatccacgacggcgagtgcatgcaggagtgcccctcgggcttcatccgcaacggcagccagagcatgtactgcatcccttgtgaaggtccttgcccgaaggtctgtgaggaagaaaagaaaacaaagaccattgattctgttacttctgctcagatgctccaaggatgcaccatcttcaagggcaatttgctcattaacatccgacgggggaataacattgcttcagagctggagaacttcatggggctcatcgaggtggtgacgggctacgtgaagatccgccattctcatgccttggtctccttgtccttcctaaaaaaccttcgcctcatcctaggagaggagcagctagaagggaattactccttctacgtcctcgacaaccagaacttgcagcaactgtgggactgggaccaccgcaacctgaccatcaaagcagggaaaatgtactttgctttcaatcccaaattatgtgtttccgaaatttaccgcatggaggaagtgacggggactaaagggcgccaaagcaaaggggacataaacaccaggaacaacggggagagagcctcctgtgaaagtgacgtcctgcatttcacctccaccaccacgtcgaagaatcgcatcatcataacctggcaccggtaccggccccctgactacagggatctcatcagcttcaccgtttactacaaggaagcaccctttaagaatgtcacagagtatgatgggcaggatgcctgcggctccaacagctggaacatggtggacgtggacctcccgcccaacaaggacgtggagcccggcatcttactacatgggctgaagccctggactcagtacgccgtttacgtcaaggctgtgaccctcaccatggtggagaacgaccatatccgtggggccaagagtgagatcttgtacattcgcaccaatgcttcagttccttccattcccttggacgttctttcagcatcgaactcctcttctcagttaatcgtgaagtggaaccctccctctctgcccaacggcaacctgagttactacattgtgcgctggcagcggcagcctcaggacggctacctttaccggcacaattactgctccaaagacaaaatccccatcaggaagtatgccgacggcaccatcgacattgaggaggtcacagagaaccccaagactgaggtgtgtggtggggagaaagggccttgctgcgcctgccccaaaactgaagccgagaagcaggccgagaaggaggaggctgaataccgcaaagtctttgagaatttcctgcacaactccatcttcgtgcccagacctgaaaggaagcggagagatgtcatgcaagtggccaacaccaccatgtccagccgaagcaggaacaccacggccgcagacacctacaacatcaccgacccggaagagctggagacagagtaccctttctttgagagcagagtggataacaaggagagaactgtcatttctaaccttcggcctttcacattgtaccgcatcgatatccacagctgcaaccacgaggctgagaagctgggctgcagcgcctccaacttcgtctttgcaaggactatgcccgcagaaggagcagatgacattcctgggccagtgacctgggagccaaggcctgaaaactccatctttttaaagtggccggaacctgagaatcccaatggattgattctaatgtatgaaataaaatacggatcacaagttgaggatcagcgagaatgtgtgtccagacaggaatacaggaagtatggaggggccaagctaaaccggctaaacccggggaactacacagcccggattcaggccacatctctctctgggaatgggtcgtggacagatcctgtgttcttctatgtccaggccaaaacaggatatgaaaacttcatccatctgatcatcgctctgcccgtcgctgtcctgttgatcgtgggagggttggtgattatgctgtacgtcttccatagaaagagaaataacagcaggctggggaatggagtgctgtatgcctctgtgaacccggagtacttcagcgctgctgatgtgtacgttcctgatgagtgggaggtggctcgggagaagatcaccatgagccgggaacttgggcaggggtcgtttgggatggtctatgaaggagttgccaagggtgtggtgaaagatgaacctgaaaccagagtggccattaaaacagtgaacgaggccgcaagcatgcgtgagaggattgagtttctcaacgaagcttctgtgatgaaggagttcaattgtcaccatgtggtgcgattgctgggtgtggtgtcccaaggccagccaacactggtcatcatggaactgatgacacggggcgatctcaaaagttatctccggtctctgaggccagaaatggagaataatccagtcctagcacctccaagcctgagcaagatgattcagatggccggagagattgcagacggcatggcatacctcaacgccaataagttcgtccacagagaccttgctgcccggaattgcatggtagccgaagatttcacagtcaaaatcggagattttggtatgacgcgagatatctatgagacagactattaccggaaaggagggaaagggctgctgcccgtgcgctggatgtctcctgagtccctcaaggatggagtcttcaccacttactcggacgtctggtccttcggggtcgtcctctgggagatcgccacactggccgagcagccctaccagggcttgtccaacgagcaagtccttcgcttcgtcatggagggcggccttctggacaagccagacaactgtcctgacatgctgtttgaactgatgcgcatgtgctggcagtataaccccaagatgaggccttccttcctggagatcatcagcagcatcaaagaggagatggagcctggcttccgggaggtctccttctactacagcgaggagaacaagctgcccgagccggaggagctggacctggagccagagaacatggagagcgtccccctggacccctcggcctcctcgtcctccctgccactgcccgacagacactcaggacacaaggccgagaacggccccggccctggggtgctggtcctccgcgccagcttcgacgagagacagccttacgcccacatgaacgggggccgcaagaacgagcgggccttgccgctgccccagtcttcgacctgctgatccttggatcctgaatctgtgcaaacagtaacgtgtgcgcacgcgcagcggggtggggggggagagagagttttaacaatccattcacaagcctcctgtacctcagtggatcttcagaactgcccttgctgcccgcgggagacagcttctctgcagtaaaacacatttgggatgttccttttttcaatatgcaagcagctttttattccctgcccaaacccttaactgacatgggcctttaagaaccttaatgacaacacttaatagcaacagagcacttgagaaccagtctcctcactctgtccctgtccttccctgttctccctttctctctcctctctgcttcataacggaaaaataattgccacaagtccagctgggaagccctttttatcagtttgaggaagtggctgtccctgtggccccatccaaccactgtacacacccgcctgacaccgtgggtcattacaaaaaaacacgtggagatggaaatttttacctttatctttcacctttctagggacatgaaatttacaaagggccatcgttcatccaaggctgttaccattttaacgctgcctaattttgccaaaatcctgaactttctccctcatcggcccggcgctgattcctcgtgtccggaggcatgggtgagcatggcagctggttgctccatttgagagacacgctggcgacacactccgtccatccgactgcccctgctgtgctgctcaaggccacaggcacacaggtctcattgcttctgactagattattatttgggggaactggacacaataggtctttctctcagtgaaggtggggagaagctgaaccggcttccctgccctgcctccccagccccctgcccaacccccaagaatctggtggccatgggccccgaagcagcctggcggacaggcttggagtcaaggggccccatgcctgcttctctcccagccccagctcccccgcccgcccccaaggacacagatgggaaggggtttccagggactcagccccactgttgatgcaggtttgcaaggaaagaaattcaaacaccacaacagcagtaag

SEQ ID NO: 1035 - protein, 1359 aa, Homo sapiens
MKSGSGGGSPTSLWGLLFLSAALSLWPTSGEICGPGIDIRNDYQQLKRLENCTVIEGYLHILLISKAEDYRSYRFPKLTVITEYLLLFRVAGLESLGDLFPNLTVIRGWKLFYNYALVIFEMTNLKDIGNLRNITRGAIRIEKNADLCYLSTVDWSLILDAVSNNYIVGNKPPKECGDLCPGTMEEKPMCEKTTINNEYNYRCWTTNRCQKMCPSTCGKRACTENNECCHPECLGSCSAPDNDTACVACRHYYYAGVCVPACPPNYFEGWRCVDRDFCANILSAESSDSEGFVIHDGECMQECPSGFIRNGSQSMYCIPCEGPCPKVCEEEKKTKTIDSVTSAQMLQGCTIFKGNLLINIRRGNNIASELENFMGLIEVVTGYVKIRHSHALVSLSFLKNLRLILGEEQLEGNYSFYVLDNQNLQQLWDWDHRNLTIKAGKMYFAFNPKLCVSEIYRMEEVTGTKGRQSKGDINTRNNGERASCESDVLHFTSTTTSKNRIIITWHRYRPPDYRDLISFTVYYKEAPFKNVTEYDGQDACGSNSWNMVDVDLPPNKDVEPGILLHGLKPWTQYAVYVKAVTLTMVENDHIRGAKSEILYIRTNASVPSIPLDVLSNSSSQLIVKWNPPSLPNGNLSYYIVRWQRQPQDGYLYRHNYCSKDKIPIRKYADGTIDIEEVTENPKTEVCGGEKGPCCACPKTEAEKQAEKEEAEYRKVFENFLHNSIFVPRPERKRRDVMQVANTTMSSRSRNTTAADTYNITDPEELETEYPFFESRVDNKERTVISNLRPFTLYRIDIHSCNHEAEKLGCSNFVFARTMPAEGADDIPGPVTWEPRPENSIFLKWPEPENPNGLILMYEIKYGSQVEDQRECVSRQEYRKYGGAKLNRLNPGNYTARIQATSLSGNGSWTDPVFFYVQAKTGYENFIHLIIALPVAVLLIVGGLVIMLYVFHRKRNNSRLGNGVLYASVNPEYFSAADVYVPDEWEVAREKITMSRELGQGSFGMVYEGVAKGVVKDEPETRVAIKTVNEAASMRERIEFLNEASVMKEFNCHHVVRLLGVVSQGQPTLVIMELMTRGDLKSYLRSLRPEMENNPVLAPPSLSKMIQMAGEIADGMAYLNANKFVHRDLAARNCMVAEDFTVKIGDFGMTRDIYETDYYRKGGKGLLPVRWMSPESLKDGVFTTYSDVWSFGVVLWEIATLAEQPYQGLSNEQVLRFVMEGGLLDKPDNCPDMLFELMRMCWQYNPKMRPSFLEIISSIKEEMEPGFREVSFYYSEENKLPEPEELDLEPENMESVPLDPSASSSSLPLPDRHSGHKAENGPGPGVLVLRASFDERQPYAHMNGGRKNERALPLPQSSTC

SEQ ID NO: 1036 - DNA, 94781 bp, Mus musculus
  misc_feature (1)...(94781): n = A,T,C or G
cttattggccttgccactaaatggcccactttaggtctttctgtctctcagttgcccccttctggaggctgcgggtatggacagtgggaaaccaaaggggacctcagtgcctctacaaacaaaagctctgtgaaggtaggtggctgaagtcacacacaggactccatgcccttcttgtttgtgtattaggatgggcttccctcgtataggacttcatggttccctcctctgccccaccaatggcatcttcttgcatcaccaggcaatgcattggcatcattccgggtttaaggataacccaagggctctaggatagagacagagcatgttccgagcgttgtgaaggagagttctttgactcaagctctttggtacacgcatcacatccaggtacccagaggctggccagtcagccaagaggcctgtgatctcacaaacatgaaagctggagggaaggaaagaagtctctctctgctgggttgaaaagccaagtagtcagaagcagctacaacgtatagcagcaacgtatagcagcagcagatcctccccaccctggagagccctgaccacataggatgacgttcgtttgcttgcatcgctttccgtaacgtgtggcttcctacctcccccacctcaccaccgctccaggctccctggcaatcaactggtagtttagcaaataggcattggctccttgccccaggctagtggccagctctgttgctctgttgcttatggaaaagataatttaaacaagaccaccacctagggtatctgccttccctgtgtctctgattgttaagatgttctccaaataagaaattttggtcttgtatccagacagaccataagcagaactctgaagacaccactgactgaccaactgtgtggcaaaggagagaagggaagaaaaatgagggaacctagagagattcagcaaaggaggcagtcactaaggcagacttaggacggtgtgtgggatttcaactctgcctccaatagagaaaacctgggttgagggctaagctgattgaggccatgctatctagcattagaggccacaccaggtgtgccaggcaccacatcatgctttcatcagagtgtacacagtactggctgcgtacagagatgattgactggctgccagtggaattaaggttctgccccgccccacgtccatgctttagaccagccccctctctgccttagcctcggatagagcccaagccctttcttatcactaggtgccttctagatcccgtccactgccttggagctaaagctcaacgaggaaccacaaggtcagcctcaaaagcccaaggttctctacctgactacatatgttacatatgtactacacgtactacatgtactacatgttacattttcttgtgtttgcatgtgaagtgacccacagattcttgtgggtgtgagcactcagtcttcagcaggtggcgctgttctgggagggtgtagaacttttggtagatggagcttcccttggggaggtaggtcaccagatccggctttatatccttgccatcttcttgtttgctctttctttctatccattcagacatgagctcctgccaccacacaccactgtcctttcctgacagacacagggtgtcctcgaaccatgagccaagataagtgttgtcaggtgtttggtcacggtgacaagaaagatagctagtccaagctgaggtggggagtagtgcccatgcagcatcctgctctgccttcctcagcatcaggggccaggcctacaggattagtatttatgtttcctaggtgattccactgtacaaccaagtttgaagttagtgataagtctgagggaagagccacatgagctctgcctctgtcatagccctatggctttagccgagttagtgttgtgttttctttataaactttacatagcaataattttatttcatgaattgtgcaccgtctggagtgtcttaagtgctggataaatggttgccacccctccttgccttctcccctcctcttcctcctcttcttcctcctcagacaagagcacatcagttaaaatgctgtcagactgtggccagtgagcaatggataaatatgtattgtgtgtcttgcaggcttcctgctgtttaccgatcatgttttattcatgcatgttgcatgcagaaggctccctaagaggggagaattttcaacctgaggtttggaagacagagagctaaatctgtataaatggagggcaaggagggcaactgtaagatgaggagagcgacgttctcaccaaaggtttcactggctactggcaaagagagcccgatgatgcttgaaaagctgggcgctccttcctttctagactggtgctgccctctagtgagaggagtcacagtcagcctgagtgtcctcatcccggaggggaccaggcagagttaaaagaaaggcagcccagctacagaaacatacactaaggaggggacgccatacaggacatcctccccaatcttttcagtcctgatacagttatggtgacatccgtcatattgtgtgcacccaccaatgtgtctaatagtcccagtttgacaaggcagatattcttattcccagatgtggcattgagatattattggtcatctagaaattgaggcatgagccaaagtggttgagtctgactgagtcaacggccctctttctatgttgtcatggtagcattttgtagggcagttcctagaacccgaggtcgcatccacctcctcttagaacctgaggttatctccatctccaccatggagacgctggacgtccttagagctgctccctcccctctctgagtttctgctttctcatcctactcctcagacatgctcctcagaatggttccctgaccacaactttatatgaagaagtggtcactccaggatggcggggtgagagcggctccactttcagaatgtattacttttacgactacacaaactagagatgagttagatcattctcctcctacagaggcagaagcagtcgccagcgtgtaccaggccagatgtcacagaagagaaatcttcacattctgagagtaatctctgtatctctctccaggacaccactacattccctcaaagactagactttttttttgtcaagcacagaacccttagctctgcccttcccccaccctgtgttgtctcactcagttttgttaagaagtcaaggctgtcatgtgagacctctgtcctttggtgtcctcctgaggctgggctttagctcctcccttgccaccttctcaaggacagccaggagtgtctgctgcttgcatttccctttgattagcaccttggactctattgcaatctctgaaatagtctgtgctttagacacagtctctagggaccagagaggtgacacagatggtaaagtgtttgcctcgcaagtgtgaggaccttagtgcagaatgctagaacccatgctaaggtagattccagtggtcctgaggcaagaagggagattcccccagaagctggaggcctgctctcctgtcctacacaatgaggactaagacatcctgtggctaccaaggtagacagtgaggtgaactcccaaggctgtcctctacctctgtgtgtgcaggtgtgtgtttgcactcacacattcaaacacttgcacacatatacacacaccatatacacatcatatacgcagatgctctctctctctctctccctctccctctctctctctctctctctctctctctcacacacacacacacacacacacacacacacacacacacacacactcagttaaaaagaaaggaaaaaatacagtcttagaatctttcctcattcgttcctgggatttcagtcattggaaaatctctacgagtcttctctaattactccttataaacatgaaccttacacataggactagacaggcaggccttagctagatgcatgtcagtgtttctctgtggaaaatagagatgctgacgtgtgccttcttgtcaatcatgataaaaatgtggcaaccatttcactgtatgcaaaggaactgtgaaaggcctttgatgttcattaatcacttaagcctcaaagcagccctgagaggcaggggcttttatcacagccactctaaaatgagtgtatggaggctggagcgtccccaaggctgcacagctggtgactccagaccctggcctcccagccccaaggtcagtggcctggaatacattggtcggctcccctcctctgttgttgatctagcctccgatcattctccactgagtatggatttgaagaaaaggatatggtgataaaagaagttggtcacaagtatagtaattataaaatgaactaggaaaacagagctgtttctgtatgttccatattctctaaagcaatcggctctcacctgggatcagcctgcacccttcactttcaaatgaggaccaagtctcctgtcatcctgactgagaaagataagagctagaagtgaaggtcaccattttcctcacaggatgatgtctctgtcttgtccagcccatcccctacaacgccctaagttggtgggtttggtgagaggtgtatggtaggggtatctatacgcacaccaaatgggaaggtgtgaatgtggccccgctgtctttccttctcctgttcttctagcgcagagcaaagccatgggcaccagtggaagctgatgtttttcagctgagccagggtcaagcctgccaaggctaagggatgtactactgggcctgtcagcagcaaagtgaccctcagactggaacagcctgctctctaaccccctgaggcccatagcagttgcctttgaaggggctgaaagagcctcctttgtcttgtgtttgtgcagatccagttagtctgagatccttgcaaatgccttttgcatttaaacagctgcctttttgcagcaaagtttgggggttgatttggcctcagtcttccttctgcatgtgtgagctccctggaaacccagttctgcagagggtttggtgtaaagccgacatcaagaagtcacaagtcagggaccaagcagctgagattctgtgacctacacatctccttgggtaaatctgaatgagggcagctgactatgatgttaatggaatcttgagatctcaggcagaaattacatgttgcttagcgtgccacagaagtactcaacagataggtgtgtgggcatatgtttgtgtgtgtatgtgtgtgtgtctctgtgtgtgtgtgtgtgtgtgtgtgtgtgggcgcaagcaagcaagcaagtgcacacatgccgtggcacactcggagatccaaggccaacaggacaacaacaattaatgaaaaataacgaagacgtgaaattggagaagatcaaggaaggggcacatgggagagctagatgggaagaaataaaaggagggattataatctcaaaagtagaagaataaatctattatgctaaaaaccaaaggaaagggttgggataatagagaggagtagtgtgagcccatagctgaaaccatggcttgggtaagctgactccgaagtcaggaactctgctcttgaagaggatctgagtttggttccatacatgcaggatggttggtgactcacaaccacctccaaatccagctccaggttatctgatgccctcttccggccttctcaggcacttgcatgcatgtggttcacgtacatacacccagacacagacatatatgcataaaagttactgtccagtgtcctgtgagttcagggtccctcgggtccctattcggcagctgcagctgtacactaagtttcaggaggtcacagcttcagcaacctccagcgacctccgttccctcctggaccactacttcctccttgaaagtctattgctactagaaagcaagggtcccactgcgcttgacaggtaacttcagagaggtaaataaacactgatgaggatagaaaatagcagctctggggcttcggtctcggctatccaacactcactcataagaaccccttaatggaccggaaagccctggttctggccctttgcctgtgatgtgtttagctacatatcgctgcagacaaatgagggaacatttgagagcgcatctatccacagtagattgaatagattacgggggtgtagggatgtaaagtggtttgggttattcagggtagttaaaaaaaaaaggacaactctggatttgtggttttctggcttcctttctcaagttcttcctcagcatgcccttcctatggtgtacataaaccaagcagacagcagagggcacccttgagccacaaatgtgaaaacaacaacaacaacaacaaacaacaaaaattccctctggaccaggaactgttctacacagggatgctacagccaggtgcctgatagtgcctcttatctctcaggcagaacatttccaggcactttgctaatagacaaacaaagccatagcttgatgacaaggagagctggggacagattcagaagaaactttctgtgagatccttatgcaccttatactttccctaaggacgcaggggaagccttgtttcaaggctgctccatccgagatcttggggctccatacagtaaagggcccttctcacatcgtactgtcgggctatccgtagaaaacttctcaaaaccttcttgctgttggtttactgtgacatttctctgaggaagagccactggcccccagagacactagggatgtactacagtggtggagcagtagcttatcattcatttgacctggggatcctccctgtatcactatgaacacgcacatgcatgtatacatacacacacacacacacatacacacacacattcacacacatcagcttgcgcacatcagcttgcacacattccactctttgttcaactatcagaatctatctgcactgtgacaaagcagaccgacatgctcatcatgtgggtattattcctttacaaagttaacatgttttcccttttgaaactttccccttaaataagaatcactgtgagatctaggggctgtggctgtccttagagtattttgaaacagattaatttcttactggcagcctattgttatgatacaaaacattatttttcattgtgtctgtcttactgtctacaggccaaagtcaagtgattgctttggggctctgggtccctacttgtaaagacccagggtcctttgccaaacacttagaaacatttgaacttgggtctatggcttctgaaattttctttttggctccttctgtatgtcagagacctctgtgaagaccaggattcttaactctttgaagtccagtgctgagtctccaaccctaaggttagcacttggctcatggaaggagcttgtaaatttgatagtcagtttacattgctatgacgaaacacccatagagataacttagaggacaaagaatttatcctggctgatgttttcagaggtccatagtcacctgattctattgattccaggcctatgctgcggcagaaggccacggcagagctgcaggcttcatggtgggcaggaagtggaatgactaagaagacttggggataaaatgaagctatataatgcacacccccagtgaaccatgtgctctgagccccacttcctaaggaaccagtcggtagacaaatgtgtcttcctgtgagcttaggttccctttgcgacactgattcccacatagaccctgtagcacccattgcttcggatagtcgttggatggctatctctgtcatgaaggattgctacttaattattcatcagcaagggctggagatgatcagtgcttagaaagtgctatgaagccagcagtttagttaagcagttacagcctgtgagtttaggctcggtgcttttttccaagtgtgatccaaacattttatgcaaagcctgtgtactatacttgccaggcaactaaatacacagccaaggcctgtcatactatcaagtgtcacaagcaggcttgcttcctaaacaaccataaccacagtgacaacagtaattccatcacgggggggggggggtggcaaaactgctgaaactgtccactgtctagtcacttcttgtccaagtatactcttgtgtggattttgacatttattatatttagagattgtaaatatttagtttcatttgaaaatactttgtggactagaccatactcacttcctaagaatgcttgagtttctattagtgcctggaatctttccaggagagagagagagagagagagagagagagagagagagagagagagagagagagagaatagctaaaatgaatgtaaaaataagagttgtaaaaattctttcaaaattcattgtgtgcacacatgtgcttgtgcatctctgtgtgtagagtgtatgtgtatatagggaggagaatgtccatgtataggtacaagtgcatacatatatatcccacgctgacgctgggcgggcatcggtctgtgagaagctgcaggaccccactccaggggtggggaagtgcagtctgaggtccgcaggctggagttggctcggggatcctggacctgcatgaaggtcgagggtaacaggttctcagactcttgggcattcctgacaccactggatgctgtggaagagctgagaatggaatgggggccatcagactggatctagccagtggccaaagggaaaagggcagggaagagagctctgcctggttcctgaggggaggagagagtccttgacttgctccatgcttggcttgatggaatctgtgactgggagcacagagaggcctcctgctggagattaaagggtcagctctttaaacaaaggcctattccattgctccccatggtgggtcccaatgagaagaggcagtccatggttttaaagcatttattgtcatggctgagagttgtgatgagtgaaacagtaccccactttctcagggtgagcctgaggttaaataccttttgcagggaggagtgtctgggaaggggagcttaattgtctaagcccttcaggcctttaggtgcctcattaaaaatggagatctgtcttgaggctaagtgatctgtggtcatgtcctttacctgtggaggggcttggggcattgcccttacatgactgatgcccacagatctatggagtggagagctgtggcctcgtgtcaggagcctgggatctaggagcatggcaaaacgcctaccgtctcttgcatgctacggggttttaaacttagctcaaccagaaaccagactgcctctcacagtccaccaaaactaagttgggtgactgatgcactccagtgacctttatgtctcccccttcctcgtactgaggttccactctggctgccatggtaggctcatttgtgagtactaagaaggcaagtgagggttcttatacttatataggaggtacattgctgactgagccgtctctcaagcactcctcccctttttagtgacagaaacactaccgaatgataggcttggatttagtatttcggattggtgtgatacaaaatcctctaaaggtaagagaaactggaggaggtgtctgtgaatatcctgttaaagaaatctatcaaattctgtagataggctggagagatggttcagttgttaacaatatgcatgtgtgtatgtagaaggtctcttatagaggatccaagtttgttcccaggatgcccatcagttagcgcagacaacccctaactccagcccaggggatttaatgccctctcttccagactctgaggccacagcactcacgtgcatatagccacacatgattcaaaataaagcctaaaacaaacaaaatgctgtggaattctaccctgataaagagtattttcatggagttctcaaagatgaaagagtccttgtgatgtcatttctaataaccaggtatcttacctggccagtataacattctctttagcctttggggactttgctccttgaagggtttctatgttttaacctaaccttttgttttcttctttcaggaatcctgttcacgatgttggtatttggaccagcctgtggatttattctgggctctttctgtaccaagatctatgtggatgcggtcttcattgacacaagtaaggagcagatcatagttgctaagcgcccttacaagcatttccattcttataagggagtcttcagcctgtggctatttaagaccctcccactaactcagcgttttatttctgtgacatatatgactgagacaatcaagtcaaaaccaataaaggactattgtagctcatggtttcagggtccacatttggttgttttgggggcctcttggtaagataccacttgattacagagagcacaaggtagagcagagccagttaccacatggtggctgtgaagggaggaaagagggaaaaaatcagggtccccatatcctcttcaaaggcacatcacagcaacccaactttcgccacagggccccattttacatctccttaaggtacacacacacacacacacacacacacacacacacacacacacgtgcaaatacaaataaaaacaaaagcatcttaagcaaagcttgctgtgcttttaattagaagaggacatatgtttctcagtagctctgggcttcacatctgtgattctgcagttaaaccgtgtggctgtctgagtaaacgatattgctcttagttatgagtctcattgctgtgaccaaatacctcacatgatggctaatcttggttgtgaacttgacacacatggggaaagtggacctccaataagaaattgcctccatcaggttggcctacaacctgtcctgtctgtggggcattttcttgattgctaattggtataggaaaactcagcccactgtggacagtaccattccctatgtaggtgggcctataagaaaggtaactgggtgtggtcctgggtatgaaccaatagcagcattcttccatacagtctgctttaactcctgcatccaggttcttgcatccaggttcctgcctcaaattcctggcctgacttctctctttaatgacaacaatagaccatcactaaatatatgatgaactaaaccctctcctcccagatttgttttgttttgttttgttttgtttgaggtcaaagtattttggctctgcaacacgaaagcaaaccaaaacgcttgacattttagaagagaaaaacttgactttggtttataactctgagaagtccaccacagtggtgaggacgtgtcagctggagtgtgaggctacagcgcacattgcagccatagtcaggaggggggggagcaatgaactacttagctttccgtggatttctgccatcttggtaacaggtgtttttaattgagaatttcatacgtggatatagtgtatggatggatcaaagccacccccattccctctcctccaatttctcccatatttacttttctctccaaacttcatgttctctctctccctccnnnnnnnnnnnnnnnnnnnnnnnnnnnnnnnnnnnnnnnnnnnnnnnnnnnnnnnnnncttccccctctccctctccaagtctacttaatgctgcttgaatgtgcatgagcataggaccacttgctggatcatgagcagccttgtggggtcacgtacctgatgaaaacttactcttcctccccagccaccattagttgccagtagctgctcagctgagaacagggcatcgtgagcatccccagtccgtgctgggattttgcctgccctgatcttgtgcatgtcttattacgctatcacagctactaagtttgagtgtacaacagccttgtaatgcccagcaaataatgtgtcatcccttgggaaccaccccccaccagggtctcctctaatttttattcttctacgagctaaacacacatattcaagatttcaaacctagcactcacatacaagaaagaatatagctgtcttatttgggcttgggttacctcaatcccagctctgtacatttatccatgtttcacttttcttttttttaaatatttttattatgtattttcctcatttacatttccaatgctatcccaaaaagtcccccataccctcccccccactcccctacctacacactccccctttgtggccctggcgttcccctgtactgaggcatataaagttggcaagtccaatgggcctctctttccagtgatggctgactaggccatcttttgatacatatgcagctagagtcaagagctccggggtactggttagttcataatgttgttccacctatagggttgcagatccctttagtccttgggtactttctctagctcctccattgggggtcctgtgattcatccaatagctgaatgtgagcatccacttctgtgtttgctaggccccggcatagtctcacaagagacagctatatctgggtcctttcagcaaaatcttgctagtatatgcaatggtgtcagcgtttggaagctgattatggggtggatccctggatatggcagtctctagatggtccatcctttcgtcacagctccaaactttgtttctgtaactccttccatgggtgttttgttcccaattctaagaaggagcaaagtacttttctttacagcaaaataataatccatttctattagtcctcctttcctttaggtacttgagagttgttgcttcctcttaccacaagagggcagaaaagcatcacaaatttattctttttagtcattccaaaaacccaaccagggtaatgctgctacctgcagtgggtaagtgggtggatcatcccacctcaatgaatacataatccctcttgggcatacccagaggcttgcaccccccttcccccagcacattccactggcaaaagggcttgaccatcatggctgctctgtggtaacaaatagtcctcacattttactgatttggatatgctgaaaattaatttggtagataacttgttcaacacagattggtgttggaaagacgtgggacttagctctctatggctgttttggggcccagacccacagatgtttatcctgatcccagtgtttataatttccaggcaggacattatacactggtccttaaagtctgtgatcagaagtaatgcatcctgctcattaccagcgcaagtctataacatatgtagagtcgtatgtaaagttacccatgaaggaaacacctcgtctcatagctaactttttttttttctttttttcttttggtttttggctgtcccggaactctgtggaccaggctggcttcgaactcactgagatatgcctctgtctcccacgtgctggaattaaaggtgtgtgccaccacacctggctgttgtctcacggttctgaagtgggtctaggactcaggagcagctttagtggggtgtaaccaagtctgcagaccgaaaaggaaaggatccacctcagagtccatgcagtggtggccaggctgaccctcctggtcctctctacaagagtctgtcaccaatcctcctgacagcatgtaatgtctgtgtcattctttcctggaaaagagccagttacacagagccatggttaagctagatataagaatatgaattccaggtggaggcaaggatttgggggtgtcttagttagggtttctgttcctgtaaagagttaacatgaccatggcaactcttataaaggaaaatatttcattagggctggcttacagttcagagatttagtccatcattgtcatggcaggaagcatggcagtatgcaggcagacatggtgctggagaggtagctgagagctctcctctggatccacagacagaaggaagtcactgagccactcggcctggcttaattttctcagacctcaaagcccagtgacagacctcctacaaaaatgccacacccactccagaaaggcctctttgggtctatggaacatcataagggcatcagctgagatctgttaacagccttatgcttacaactattgtggccactgtctgaaagagaacacgggatttctacatagtttcatcagtaacaaagccccattcccttcctctcctctccctgcaggcagatgggggaggggagagctgatgctgcttcttgggctgatctgttctccggatcaataagaactctcagtccctgggttcccaatccatcatctcttgacagtgctaaatttactaattcaccccaaagaaataatgtggtcttaaatccaatcaagttgctctctgattcagtccattaatcccactgatatatttacttgtctctaatgatgttacaaatttccaagtagaaaataaaatcagacgcagccttatttgttcctgccaagtgctaggcctggacaggaagggatgaaatgcccctgtcttccagctgcctggccctttgaagtccactctagcaagcaaggatgggctgctaagggacgctcaataaaaagtcagctgccatctcctgcagacagaaaagctagctccaactggtgtgccaaaggcagcactctccaggggcagccaggggctggaggagactggaagctccttgggaaagctgccttggaaagcgatgtgtgatatgttttgtattggccatttgtgttatcaggagtgacccatcaaagtgaggcctagggggtggccagaatgtctgagccagaaagaaccttgggcagcacgcactttcagatctttcatcaaattagtgaggatcctgaatctcaggtactgaaggggaggagactcaggtacggaaggggagggatctggatctcagatccggaaggggaggggtctgacccgaccagtggaggcgcatttgtatacaaaccaagtctcctgtgccatgtggcagatttttcccactcatgatcccctctcccagacttcatgaaagagcctcctctctcagtgcctgcagaagccatggatagaatggcagctgggagcacttaacctatcacctacaggccctcagcttgccaagaggatgacagcactaaggaccccttcgagttgtcatcatctcttcttgtcccctaagccctttgagaagttaagcgacctcctccacccttgattggcattaatgcctctgtgtacacctcagatggacacttttccttactgtctccatgtcttactgatggcagccttcctgagcacaaggtgaccagagaacctttgctaagagaggatgtctgtgagtcccacagcttcttgaaggtacatgaaagtcagtgctgattatcatcactagagggcagaagagcaccactagttagggactcaaccaggaaaatctcctttccaagcaattttcattgtttctgcccttgtggcagaaccttgtcgtgtctggtgcatttggctgtattttgaggcaggatttctatgtcctttaagggtcctaaggatagctcttctttagggctgcccaccatatacaaatgttatactctacatgaatgcctgtatgcctagagccacatgcatctctggaatctggggttggggagcatgcagggaaagcaatccctgccttccctggaatttatgtggaggtggcaaaggtgtctatggaaggcccgtactgtgggacaaatggaaggaaagtgtactttcccctgacacggaggttgctaaggaagcaacagcgccaagagaaaggaggcttgcctggggcctgggagtcagtgcagctgtgggagcaggagagcaggttacttgcaggaatgagccagcagagtggcagaagagccccaagagggggtggaggtgggcagcagaggctcatctggtcaggcttaggcatgggactcggtggctggcctttcatctgggtttgatcctgtgtggctccactgctccatcctgtgagggctggggaagaagggatgagacttgcagagatctctcttcagaatgtcttgttgaaactaaagtttgaccgtgaacacagaaccttgacgacggggctcggtttcagggtgtgcccccaagcactgaatcgaccagcattagccgtgtgggtttattgcagggagatttaggaacagcagctgccacggttaaacagttattaaaggtgtgcctgtgctgtcttgttgggaacttgggaccttgtcgggaagtgtagcttctatttgataaggcattgtgtgccctgagagtctagaatcctgtgaatccagatcatactcccgtgagctctgtgatcctggggcagccattcctccttgagactgtgtgtggctaatgcaagaaaaccacacattcaacccagacaatgtcttgaatataggaagcgtgctataaaggttagatactatggcgcatctgtgaagtctactagcgtctgcagttaccaagggatccagcatgctttcagccctgattctcaactctttctctcagcctagcaacttgcctcactgaaacctgtacttaatcaagtttactccctcccatggatcttttcctagttgtttgaacgtcaccagcacacatgtggacaccattccagagtcacgcgcacaccagctggccctgcagacagctgcatggcattggtagctgcaacaagatgctatagcccatgtgcttatgggaaaaggtcaccagctaggcttcctcctctgctttttgagaggactagcgccgcagccagcttccttcagtttggtggactcattagctggatggctgggatatggaatgccccacaccctcaccacctccactttctaattaggtttgtcacttaatgatactcttgaaattcccgagtcccatagcaaaagtctgatatactttaagcaaataggtacatgaacttaaaaatacccggagagccataatggcctttagtatatggcccaagagaaagaagggactgtccccaatttgctttgagccagagttctcacagtctcgtgggtaggcctgttaatgagatgtgtgctggcttcagcctgcttcatctgattttcttcttttttaccttagaaatggggacagagccctgataggctccttgtagtcacttgctcttttcagaggtgacaaacaactgttagcatcttgcttcctttgtacaacagaactaaaaaacaataaaagcaatccagagtctagatgccaaaacaggacacaagtaggcctaagccacttgctgggttaggagagatggctaagtgggtagaagactttctatgtgagctgaagatcttgagtttgaatccccagcacccgtgtgtaaaagccaggcaaagctacacaatgcttaaagccccagtattggagggcagtgacagacagacagatccccagagcatgatagccagccagcccagccaaagcggcaagcttccaggtcagtgtgaggccctgtctcaaggcaataaagtacagaagacaacagaagaatatatgtggttatcatgctctgaactccaagggggcatggacacacccttgtgcccatgccaaaaaaaaaaaaaaaaaacacacataaaacatgcgtgcacacacaaataaagaaatgggtcttctaaggagggagagtctatacatgtctgagacacttgcaaagacaatctcagctctgtcccatctcctgacagacatatcccacacaggcacagatggaagattgtggtacggtttcatttctttcaaagtctctcccttttgactgacagaacccccttgaaaatgaaaatcctttttccctaagcgcctagagtatccaagggtaagcaagtggctgctgagccctttctctgtcaacctgcttctcctcggcctgagtcaccatcccactcttatgtcatcggtatattgatgtgtctgagtaaacgagagtgattggtgcttttcagttttgctctggacatctcacaagcagccaccttcaaacagactgaaaacaagcttgaaaagtcaatacaggaactagaaccagatagaaaaatagattctcaagctttgctgccccattccaacctgaaacagtacttttttctgtctaggtttctccaggactgctgtcgctacaaatgtctgttcccccaagacattcatactagttggggtaggcttgaccatgctacagtaacaaacatatcccctaatctgtggcttagggtggtagaattttaaacttgttcctgtcaagtatctgcagctggtcaataggaacgtttcattaatgtagtcctcctgggatgaagaaactcgggaaccacacaccagcacatggacagtcatacccagcacatgcacagtcatacccaagaacatgtacagtcatacccagcacatggatagtcatacccagcacatgtatagccatacccagcacatgtacagtcatacccagcacatgtacagtcatacccagcacatggacagtcatacccagcacatggacagtcatacccagcacatgtacagtcatacccagcacatggacagtcatacccagcacatgtactgtcatacccagcacatgcacagtcatacccagcacatgcacagtcatacccagcacatgcacactcatacccagcacatggacagtcatacccagcacatgtacagtcatacccagcacatgcacagtcatacccagcacatgtacaatcatacccagcacatgtacagtcatacccagcacatggacagtcatacccagcacatggacagtcatacccagcacatggacagtcatacccagcacatgtactgtcatacccagcacatgcacagtcatacccagcacatgcagtcatacccagcacatgtactgtcatacccagcacatgcagtcatacccagcacatgtacaatcatacccagcacatgtacagtcatacccagcacatgcagtcatacccagcacatgcagtcatacctagcacatgtacaatcataccctcatacccagcacatgtacaatcatactcataagtgaagtatgttcccctgttcactctttcctctgtaaaactctgctctgttgggggaggaacaggcatatgctctatgtagccagaagaagagctggtctacacataggcatgaatgtcacctgccatttggttctttgccagaacacacagagaaactgtcggaagattatatgccccagtacaggggaataccagggccaggaagcgggagtgggggtgggcagggtgggagggagtagggtggggggagggtataggagactttctggatagcatttgaaatgtaaatgaagaaaatatctaataataaaaagaaaagagtcaaaaaaaaaagaaaaaagaaaagaaatctgtctcaatatcagccattctagaatgatgtctcctgagcattgacaatggccgcacaagtagagagggttttttccccctgttaagtgtcaaaattcctcataaaaaaaaatattacttgaggagtttgagggatggctcagttggtaaagccctggctccaggaagacataagtataatggtgcatgtttgtgatcacagcagtggagaggcatggacaagaaaatccgtggtggagcttgctggacagccagcatggccaaatggatgagctgcacaccaataagagattctgattcataaaacagagtagctagcttcaaaagagtaatgcccaaggttgacctccggcctctacaggcatctttatgcacccacacaacaagcaccttaaagcacacatgcatttccacatgccctgatacttggtgtagagtttcccatacaggttcaagcttgagctgtcttccttaagtcagatagaaactcactcactaagcctctcccatgcacacactgaagctgactgctgtcccctaggcatgctttttctctcctgccacagtgccctgggtgagtaatcccctcctggggagcacccaggagagccaccaacgcttttatgaacttgaccctccccgtgccttcccgtaagcctcctctgagctgacacaaatggtgggcatgctatggttttgacccaggtgacatgttccttgctgtctttccattcttgagcagtcggctttgtgcatgcatgctcatagggaagaccgtgacacagacagctcatatagccagtgccagcccatctccccaggatgctttcccacacatccaagagaatcactgattgccggcgactttctacacagcactaattttgttcccctccaacaactgctaggatgtctctgcctttgctcacatctggagcctgtagggagtggaggctcccttctttgttttcatcccttgcttggcagcaggtgaagaaacacagtaagtgactagtgaaaacagcagtattcagccaccccaggcaattgtacttccttttcttttccctcatttgcatgaagatgcttccagaatcaccttgggtttccagggccctggtgaactatttcaaaataaaacccatacagggaaatgttcattcatacacttagaagcagaaaggggggaataataagagctgccctatctgaagcgcccgcatgcgccagaggattcttgcctggaagctttcatccttacagccattctcgaggtcgggggggggggggtgacactctcatttcataaatgatgaaagggcttagggtgtgctcaggctagtgagcatcagagctgggatttgggcccccacccccatcagccctctacagctctctcctctccatggcttcacaaaagcaaatggtccatcttagcacagcgagggccacagagcatcagtcatggtattcagggtagaggttatcaatatcccaaagccaatttgcacattaccagaactcttggtagtcatgggcctattgcgtagagtacagaaatcaagcgttcagccaggtcctctgggggacacaaagggattaagaacagctaaaaggaaatctaaaaagtagtgccaagtgtgggagcctctgtgtcaagatctctgtgttctaggctgcactcgtgtgatcctgggtaaagaacctaggatctctaagccttagtttccataccaatctaaaatggagacaaggaaagatcctattctgtaggcttgtaggaaggattcactgaaataacaggagtgtgttgtgtgtgactcctagggcagaggaacccctgggaaagtgatggctggtgttgtccttaggagtctgagggggctggggacactttataaatggtgaagtgctcatctggtgtctgcagtcatcactcttccccacactgttcatccatctggcctcaggctacagccccattgttctcgcctcacacacaatcacccaggtctccaagaacctccttttgggctctgggagcatggtttatcaccaaagtgacatttctaggtagcccacctgaacatgccactttgcagggcagctctaaaagggaacgccaaaagacgaggaagctacagtgatcttccgttcctgtgacttccactggcagatcaaaggcatgctggtaccaaacagcccgagtccacacagccaaactgcacagatatttgtggtgcctttgagcactggcgctgtgccagagctttctaacagagggctggggtccacactcaagacttgagtcaggctagccagtagaagcttggggacaaagaaccctatcataagtgacagattggcatcaaccaagtataggaacacatgtctggtgtggctttctggtccttccaaaggactctacagagtcctcctcatcagtgtttgtagattagcaaactgaggcatggggttcagaaagactcagaatggggtaggatttcaatgcatgcgttctggacatccattttctcgaatcacattccgcatgtgcccatcttagccgtgagcctgatgtaacccacgctgtgagggatggaatgagttttcagacaaactgttccaggtgagagagcatagatgtagtgacagcctacccttggatagtgactgtttgcttgtgtttttgtagactcagcttggcagtgcagcaagatgagtcaattcctgccttggctgtctggctcctcgctgtttttatttagacagattataagcgtgaagcagacaagaaaatgaaggggaaacatgctcggtccccagtaatggcagaaactggagcactgacagggagcagatagtttcccagcccagagccccacccacttccatcaagctctgtagcccatgaactcggtgctctggccatctctcttcatcacggtccccacagcccacacgcctactaagctctgcactttcttttggcaggtaacctggacatcactccagatgacccgcgttggatcggagcctggtggggcggctttctgctctgcggtgccttgctcttcttctcgtccctcctgatgtttgggttcccacaatccctgcccccacactcagaccctggcatggagagtgagcaggccatgctcccagaaagagaatatgagaggcccaagcccagcaatggggtcctgagacaccctctggagccagacagcagtgcctcctgtttccagcaactgagaggtaagaggccagaacttgctggtcagaacaataaggatattgtgatggggtgaggggaggggtggctgctggagggttggagagtttgacatgattggcccacacaaagtttgtgcttgacttgggatcagacatatttaatgaatgcataaataaggtaactgccatgaattgatgaaatcccagtggttactgtacgagagtctcgctttgggggcaacagcaaagctctatacttttaaaaggtggggaataaacaaatgcagcttgtctgagaaaatggcatggtgcaaataatgtcaactgagaaagatctcttctgggttgtttctgctgtcagcacagccccttaaaggcttaggaaatgactgtgatactgaatataactcagcagcctcaggctgctccatgctccccattcatcctctcctgctctctttcacacacgcacacacacacacacatgcacgcacgcacgcacgcacacacacacacacacacgcacacacacacacacacacacacacgcgtgcgcacacacacacacacacacacacacactccatgctccccattcatcctctcctgctctctttcacacacacacacacacacacacacacacacacacacacacacacacacaccccaagggggctacttaagcttatggtcttccctaacgtacttggatccgccagagtaccttctggagtttagacatgacagttggtacctgggcctgagccaggctcatgtccctcctcttagagaagttgggatgggaggaagatgggtgagcagtaaccttttgtaaagcctttagcccccacacaggcaacattccgaggcatccccagcatctccctgggatcaaatcaaagtcaaggtaggcaggtaaaggatgaggtgcacttgaggcaggtgatggtcccaggctttgactaaccccacacgtcttcattgccccaggccacactggctgtaaggtggctccactctccttgccatatatctacacttttaagactatgccgcagttctttgacagcatcatcctgagaacaagagctctgcctgcagagacacttaatcaaaccttcgagtccatgaggagcccaatagacctttactgtttctgaaaagacactaatttaataacccgatgtcatgtctggtcctgtgttctctgtcagtatctacaagttctgcgagccgactgatggccttaaaactcctctttttaagctctgaatgcactagaaggtgagaagttcagctagtgtgtgtccttgaggttgtcttagctgggaccacccccaccccgagtaagtgtgcaaattacctctacctttaaaactggcagattcaggaagtccccagccagctcaagggtgatgcctgctgttatcttaagagcacagctgactgtaatcccagtccccaggcccacaataatccatccgactggcatcagagttggtctggcacgagaggaccctgattcccagtagtgacaaccattccagatctttccttgtccaggtaatggtctcgcctcccacagaccacattcatagacccttcctttcatctctgggtatacaaagataaaaaaataaacaactgggccatcagtgaactcattggcttgccagcaaagatagccagtggttcgggaaatggcagccctgtcgagggccagggaggataaaaggcagagctcagctgggtcctaagctgggaactgtcacagtttcagagaatttcagagaaggttcagccattttgcttcatcttctgcatttagggagtcttcatttagggagggctagggatatggccatgggtcaggggctcgtgtcctagaacttctgcttccatagaggaggcatgcagcaaggaggtcaaatcaaagtgaggacgagcattgagtagttggccagaaatgagaagaatgcatttggtctgatgggttcaggactcagtagatcagaagtgggcaagcatggggtccgcatgaacgcacttccatgagtaatggtttttcatttcaaacaagcagtccctccttagttagctttgctaaaggactagactagaaggataccccagcagggcagaaaagttgtgtctctagaagacttctgcaagagccagagttcagtgacatgagggattctgctaataaaaaagaatccaggtgctggccacagagaaggatgcactgtatggacgtccttcgtcttctcccatgagcggaatgtgtctgccacagaaacacattcaccaaatgcacccttcagtgttgctggtgttcccacactaactcttactctgattccctctccctctccctctccctctccctctccctctccctctccnnnnnnnnnnnnnnnnnnnnnnnnnnnnnnnnnnnnnnnnnnnnnnnnnnnnnnnnnnnnnnnnnnnnnnnnnnnnnnnnnnnnnnnnnnnnnnnnnnnnnnnntccccgggtatgtttatgaacacaaataagcaggacactatcataagaggagtgcacgactctcagaatcaaggtggccgttttctcacgcatctctttggagctttcaaaggtttttcttcttgcacaatctacttgagtcctgagccatgctcagaaactccacccagtgtgaccgttcaatcccaccatgaagcatttccgggtttctgagagtgatataaggtcacctttctttagtgggacatcctgagatccagttcagctcagctacttttccccttgtgacacctgggtcatgacatttaactccacttattgttaacatggagggtatggatcatctttacaacaactgcctccgtttgatgtggctgtttatcactatacacagagagcttatgttgtggtattatgggaactgggtatgtggtccatgttcaagggctttgaaggtctattgccaacaatgccagccatcggctgagcttgtaactctgtataggatgaggaacagaaagcatgggatctggtttcaaagtaggcttgaagttccaagcttatagcagctgtcatagcaatagcattttgataaagcagacttcagacaaacaaatacttagggttattaagccacagggtcaccctcaagtgagaggctaccaaacccgggcataattttggatctcaacatgccaccaaatctctttcctttaagtcttggctctgagatgcttctgccccgatgagcccacacttgaggtaccctcaccatcgctgtcatcctaatgcctagtactcttcgttcctcccccttcatgccaacaggttatatgttgacaactggcatgaccctggcatgtagctgtacagtatgtgggaagaatttatgaaaagctatctagagggaagaatagctcaatgagacagcagtaaataatctagagccaacaaggtagctcattggataaagatgctgctgctgagcctgactgcttgagtgtgatccccagaactcatggatagacaaaaaacaaaataaaactgtgtctaacaactttttcctctgaacttatggatatgtgcatgtgtacacacacactcacacaaatgaataagtgtaaatttttaattaaatctaaatacaaatcagtcatgtttataaaataaacactcaatgtcattaccatttgcatgttaaatctcacacccaccatgtgtgatatgcataggcatgcttttatagagacatgtgtagtggtttctgttactgctttcaatgtcacttcaatagttttgtatttcattgtaagttgtcttcttgatcacctgggaagcctcaatggacaggatctgggtccccagtgaagtgatctgtcccccttcatcttctggctctatgcggtttatgtaatgcatcggtaattctccctcttggctctttttctgtctgggatatcctttctcctttggttcacttttgggctgtcagctatattgtgcttggatatctatcacatccacttggcctctgcaaagtccctactactacattaccattgtagtcttatacagccaggatggcagtctccatctactccagagcaaagctctcattcatctgttcatttgcagggcatggcagtgcctgacacagaagtggtggccaatttaatgaacgaagtaaccaataagtacacatgcgtgtgcacacacacacacacacacacacacacacacacaagcagggcctgggagcatgacccagtgaatggacttgttgcacaagtcttagggcctgagttcagatctctagcatccacataaaaagccaggcacagtcacatacacccgtaatcaggaaaccaaggcaggaagagccacagtcaatctagctgtgaatcagcaagtcccagatgcactgaaagactatctcaaaagataaggcagaaaatagtagaggaagatactcaacatcaccttctggcctctacaaaggtatacaacacacacatacacacacacatgcgcacacgtgcacacacacacacacgcgcgcacacatgcgcacacacacacacacacacacatgcacagacacacacatcaccaccaacacatacacacaaacacacacacacatacacacacacacaaacacacacaggcatgcacgcatcaccaccatcaaaaacagcaacaaaaaaatgtttgttcttatctatatctcagggaatctctctagctctgtaagccattagtactgttttacagatatggaaatcaaacttagagatggaaagaaaagacatttgaatcaccgtgaagaaaaacagtgcctgtctccttaagcttggcgtggggctgtccttctggctgaataagctctgctaaaaaacaagtactgtcaccaggtgctaagtgacctttccatgcagcgtactaaaaccacctcctgaggcagcacagatgtcccctaaaacagtgtgtcatcaaagggtctgcagctgcaaggggaggaagcttctgctcccagttagcactggcgggttctgactagtggggatcctgtagctgcctgtttccaggctcagaatcctcagggcaagttcctgactttgatcttggagaggggcagagaagctgagcactcttgtctcagcccttcaccctgacagacaagtggcctctcaatatccttgaaaagacttctgaagccctgtggacttcctctagtggagcctcactgtgagaggagcaagctctgccttaactaccacaccctggcccagcccagcccagcccagcccagcccagccctgcctccatcagtgtgatctgcccagggcccctgacctacacctgtcattagcagctgggtggagcttagaatcatcactgaaacaggtctctggtgagcagaggatgttccaaaaaggaagacccaccctgaatgtagtcagttccatcccaggagctcagccccagactaaatcaaaagacttatcctctctgcttcctcactgtggaaacaatgcgcccaactggtcgcctctcatgcccactgcagttgcttcccaaggctgccaaggtaccctccaatggagagacagcagaaacccttcttccttcgaggcacttcagtcacttgttttgtcacagcaaccagaaaagtaagtgatacatctgatcatgctgccacctgccacttaaagggacagtggcaaagccctgctgtggctcctctgacttcgttccacacctacctcattctgccatgtccccaccaccaccccgctctccttacaaacaccgcctagttttctgcccgctttttccttcctgtgctctttgctgaagttcacttccggtcttggacatcagcttccttttttctgaagtacagcttcctgacttcttctttcatggcctcattttactttctgctaggtgaagtatcccttcccctatacctctgtgaaggcagagacatttgcattttgtttgccacctagtactccattctgtggtaagaggaggagttaggggatcatggaagggacattaccaggcccagctcgacttcgttctcctgaaacaccctggccagacctgctccaacccacccagctctggcttctgcatggccccgctgtgagcatgtgggaagagctacacatgtctatgtgctaccacaacccacaagtgacccacctgtgtcaggaagggtctgctggacctcgctccagtcctgacttcttccattccttttcagctcagtggttggattcagcaacatttttcttattgaggagcctgcacctctcattcgagtgtgttcacgaggaacctggtagtctaagcaggctcatgctgcctgcttgatgctatctattatacaatttgtctctagagctgacttctctcctcctgtagatatgttgaaaaatctgcattttgcttccatagtgaaagaagcagtctaccttcccaaacatcttgagccaggctgtgcccacaccctgctgtgtcacaggagttcggttatgactcctcagggaccaggctggtccatgggttcagaattttgttgttgatggtggtggttttttgtttgtttgtttgtttgtttgtttgttttttatcatacctgctgggaccagcagtgagggggggacatgtcccttaatgtgctgctctcctctggctgttttagcaaggccagtgagacaaacatgagagggcacccagcatgaggccaggcatggttaacatgtcagaatgtctgttgaatgaataagcaaagggaataacggaaaggtagtagcattttgcagaggaggatccatgaaactgatcaacagtaccatgaagggaaagcagtggctatccaaacaagtagaagcctgtttgtgatcttctcagagtttagggggaagaggcaagttcataggtgtatgcagataggcatgcacatccgtgcacataaatgtaaaagccagagttcaccctcgtgtgtcattcctgtagagccatctgtggtttgtgttgttgtttgtcttctgtattgtttgggttttccagatgggcccttctctagcctgggactggtagatttatttatttatctaaccagccagacacagggagagcactgtttgttgctaccttccaggtgctatgatgacaagcgtgctgtcttaattagggttattattgctgtgatggaaccccatgaccaagagcaagttgaggaggataaggtttaatttcgtttatagttccatatcactgttcatcgattgaaggaaaactggacagaaattccagggcaggaacctggaggcaggaacagatgcagaggccatggtggggcgctgcttactggcttgtgcccccatggctcactcaacctcctttcttgtataacacaggaccactagcccagggatggcacctcccatccatcactacttaagaaaatgcctgacagtgtatcttctagaggtctagcctcagctgaggttcactcctttcagataactggcttgtgggaagttgacctaagaagactagtcagcatgcatgtgtcactgccccaggccatttcatgtggatgctggggattagcacagcaagtgctttactaacagaaccatcccttcctctttgagggtcatgctttctatcagcacattaacagctctgagcaggccaggtccaaggaaggctagataacttcattttaatctgtatttctctaagctgcatgactgagagactatgctagatctatgatcattggcaaacactaccagaattcagggtacatgatgaagaggaccgtaggaagttcaaaagttgcattaaagggccatggagcatgttctggaaggcctatctggaaggattggggaacaatggtattgccctgaaggagcaggcagatgttcctgggtgtggttaggaggagggcatctagtttgtagcatgtcatttagaaaaggttgtggtagaagacaagtgaggacagccccgtgtgtagtagagtgtctgctatctgaaatggctcagaagtcccggttgcattatgaatgaatcatcaaagccttggcattgaccttcaaataaaagtgtctggactctgttttataaacccctgtctccctgccagcagttttgagtccataccacctgtgtggtgtcttgaaatactactttgtatccaccccgcatggaattatgctcccagagctggagaaggagaggctcaggcacggtgatgtctgaaagcctccaaagtctttctaagtaaattgctaactgaacaggaatgccagagaaaaggaggtcccttgctgggtccccatgaagggctgacaggccaaagctctgcctccccccacttcccgtggttggacttgtataaattgaagtgctgagagaactctgtcacaaataagatgggacaggatgggtcccctactgtgacctggctaccatgaggagcctgctgtaaacaagcatggcagaaagtagctgacaggctgggcatcaacctgctctaccagaatgttggtctttgcagactttccaagaatgaattctcacactgtgggagttttcacttccagaaaaaccagggacagccaacctgtgtggcaccagggcagagaacattttcacagaggaagtttttagacacaggcgtgaagtaggggcacctgtttgcttaaaagacttgttattgcctaagccatctttctctctgctgcctttgccttggaaagatgcaacgcatgggtctgaagaagcagctgcttccaagcctcctttacggtcagctctgccctccctgggtaagcctgagcttgccaggccacctatggagaaagggaagaccctggataacactctggtgtggagctacagcctgagtttcaccctgttcttgctttaaacgtgcttacgagtggttcctcttctactctctaagaccctcctggtggtccccccaaaatcagtgggatcaatcaatgcttggctggggctcccctggctgatgctctccagctcacactcaaccctggcccagtgctgcgcaccggcatacatcctccccaccccacccccagccaatgcacaccagctcacactcagcttccattctaagtgcctattctgagctgatggtttccctgttgctcactaaggccaccactgtctccctacaaagaaagagagacaagcattctggatttctgaccccagagccatggtgttatttatcttgactgagttcattgtcccacttccaccatagacatgagcctgtagaatttcactagtcatttggtcctgagtttgcctttgaccctgaaatgcctgcaacaggttcccctcctcacttttgtgactcatgaactcagttagttattggattccttaaccttccatacaccacccccccacccctgtatttattaaacatatgctcttctgggacatggtgcccttgtctcaggcggctcttcacctgggaaagctaggaggcgaggcactgttggcaggaatggcagctcagggctgggcacatggagaaccagctggaagacggctacatcataatgctcctccttccccttaaccttggaatcacggcagaacctccatcattgcattttcccatttctcctttccttccttccttccgtccatcctgctatgatgatttctggttatctgcccagctcattccactcctctcttctctccaggtcctacctgttgtgaaacgcctcatgttgactcagcctttagataaacagtttcccccatgtcagcctgaaggttgaaattttggatttttgagtttcaggcttatgtgggttcatacttgccctcctgcagtactcatctttgcatttctgtgcaaggtggagtttaaagactcttggtgcctagtgtcagaagcactgatgctaaacctccctgccaccgtgatggatgcaaagtcctcagtgcagtgctctgtccagcagcagaggtttgacagagatggctgtggtagtatctgctgcattcgctggccttatcttcctgttttgacagtgggaacaatgacatgacaccatatcttaatgaatgaagcaagtcaaggccaattttagtagagggaccaaagtataagtctcagagtgtaacccaatggggtctccatggatccccatggtaaccactgttggggctcccccctgtctggaagggtagtgagttaggatatttgacttctacgctgacctgttgattggctctatggaggaggtgcctctatttaggaagccttttgggtccaatgacgactcccaagaactcagcataaaacctccacagcacaatctttctccaaccatcactcagcagtccactcacagaggtgagtcagcaaagcaagtcttgtgactcctggacatgctgtgcaaacactagggatctctcacttggtctaacttctgcctgttggtcttggttctcactgagctgctgcctatgcaccagggatgctggcccatatgcttctgacctcagatctctttccatcttcacagatgggtaggaatgagtccccacacctgcctctttagagcatggtcccggacttgactttatacagctttcctcagcaaaacttttcctatggtgccaagcttctacttcagcccttcaactctttcttttgtttcttcctcctctcttaggtcctttcctcaaaagatcttggaccaagtcccaggtccacagcgtacaagatcattttttctagtgaggtggaatatttgaatacttggttcccagtggatggaaccattcatgaaggattaataagtatgtgattaggggtggactttgtggttttaaaagcccataccatttacagttagttgtctgtctctgtctttgtgtttctctctgtctctctctctctgtctctctctctgtctctctctctctgtctctctccctctgtctctctccctctgtctctctgtctctctctctccatatatatatatgtatatatatatatatatatatatatacatatgtatattgtgtgtgtgtgtgtgtgtctcaagatgtgagctctctgctactgtcccagtgctgtgccttcctgcctatattctaacatggccctctgccataatggtcatggactcaactctctgaaaccgtaagccccaaataaactttttttccgattacatgcattggtcatggtgtcttaatacggcagtaaaacagtagctaggaaaattcccacattcattgttatttgtgaagctgtatttctgattggcaggtccagcctgctttcataattttcataataaaaaattgtggctcacaggatccaggaaagaacaaaccacttgtcacaggtgcatgctgtggcagctcttgctggggctggagttcctgctatgtctctctcattgtgggaccattctcttgcttctgttttctcatttgtaaatggaggatttcaatgattccaagattgtggtttttgtgagggttgtgttatgagtctgtgggttgtcagtaaaccctcaggatggcatttggcacatagaggatgttctgatgacaataccccctgtcttagtcagggtttctattcctgcacaaacatcatgaccaagaagcaagttggggaggaaagggtttattcagcttacacttccatactgctgttcatcaccaaggaagtcaggactggaactcaagcatgtcagaaagcaggagccgatgcagaagccatggagggatgttctttactggcttgcttcccctggcttgctcagcctgctctcttatagaatccaagactaccagcccagagatggcaccacccacaaggggctttccctcttgatcactaattgagaaaatgccttacagttggatctcatggaggcatttcctcaactgaagctcctttctctgtgatatctccagctgtgtcaagttgacacaaaactagccagtacaattgaccccttgtcaacttgacacacaaacacatcactagtaagcctcaacccttacattcttattcatccccaagatctaaataactttaaaagtcccacagtctttacatattcttaaaatttcaatctctttaaaatatccatctcttttaaaatccaaagtctttttacaactaaaactctcttaactatgggctccactaaaacagtttcttccttcaggagggaaaatatcagggcacagtcacaatcaaaagcaaaagtcaatctccaaccgtccaatgtctgggatccaactcatgatcttctgggctcctccaagggcttgggtcacttctccagccatgccctttgtagcacatgcgtcatcctctaggctccagatgcctgtactccactgctgctgctgctcttggtggtcatctcattgtactggcatctccaaaacacttcatgaccccttcagtcctgggccttcaattgcaactgaggctgcaccttcaccaatggccttccatggcctctcacagtgccaagcctcagctgctttgcgtgaccccttcatgccttcaaaaccagtaccacctgggtgacccttacatattaccaagtccagccacagcacaatgtacaactttggctatatctggaacacagccactgtgctctcagaaaacacttcccagaagatgtcacctcgatgatgctggtctcttcttaatcaccgctaatttcttagctccagctaaccagcatcaatagtcccagtaatgcaaagtttttgctttagtagttctggtatcttgttaatcacagctgattcttcagccccagctaaccagaactacagaatcttcacagtcaaaacaggaatgggcctgaaaagagtctttaatttttccctctgaaatttcacaagccaggcctccatcttctgcactgttctcaacgttatcttccaagctcctacacaacatccaacagagctcttaacaacggatggatcttcaagcccaaagttccaaagtccttccacagtcctccccaaaacatggtcagcttgtcacaggaatacctcactcctggtaccaatttgtcttagtcagggtttctattcctgcacaaacatcatgaccaagaagcaagttggggaggaaagggtttattcagcttacacttccatactgctgttcatcaccaaggaagtcaggactggaactcaagcatgtcagaaagcaggagccgatgcagaagccatggagggatgttctttactggcttgcttcccctggcttgctcagcctgctctcttatagaatccaagactaccagcccagagatggcaccacccacaaggggcctttcccccttgatcactaattgagaaaatgccttacagttggatctcatggaggcatttcctcaactgaagctcctttctctgtgatatctccagctgtgtcaagttgacacaaaactagccagtacaccccccaaatctgccttttccctcccacaatgtacagcaatcctctgtcccacagcaatgtcttctaagggctcacagtatatacctgctttccatggagccagctaccctgtgcagttttcaatcttgtaccatcctacggatgacagccatgggcttctacagagagccaaaaaggtccccttaaccctgttggtggaactgcgtgatccaacccccttctacccagcttcagtactaaagctaaatcagtaaagaggattaaatgactagtgggggatgcagatgtgcagtggcctgtgatggccctggttcaccggtctctgtttgtctggactactccctcctcaaaaggttgaattttatggtttagcaatccacttgaagcactaagacagccttacagtcaagctaattaaggcctcttatccaagctggggtattgaaggtgggctgaacctgtaaaaatggagttagcatttgatagctacaagttcttgcaataaaattgtgggtgggaggaagaatgtgggaggaagctgtcatttctggaagccagtcaggttggctacaaagagaaaagggtcatgcaaataaggtgccccagtccttccttcagtccaatgattcttgaacttaatgatttttaacatctaattcaaggagaaattagtcattaggcattaagacaagcaggaagactcctgtcttaacaaagagcccttcctgcagaatgtaatgaactccagaatagttaaaagctcgcagaagtgcagaaatgttcttttaactgaagtcgccctcatggaacgagaggccttcctatccccaaacagatcatgaagatgatgatgaagagtcacggggctactgaggtctaaagagatgtggcaactgactcaaatcatcctcagtgtcattttggaggtagataaacttggttgtcagaggctccaggtgatgtagtccagggagagcacaaagcttttcattcttctggagtcacactcgacagagactccattccaactgaggacacgaagcacacagcgagagtgtgctgcctggattgtcccaaccctgccccggtgcttccagaatatagatgccatcattccgaaggagcctagtgactaagtcacaattgtgtctgccactacacatcagcagccaggactttgttgttcatattcatccattccaagtaggtcctttgacctcatggtgtggtccatactggtctctctgcagtgtgtggatgtaactcaccagaacctgatcttgagtacagagtagcctcacgcttggcacacacacagtctcaaatttgctatggctcatcaacaatgattgatcatgatggattcttcacacccaagagacctttaactgtgaaaagcagatcaccctctgtgtattttatgttgtgttcattttccatatttcttaagctacattttcaaacactgcagagtcaacagttctgggagtatttgtacaacactttaaaacaatatggatttaacaaaggaaagtttcctaacatttaaacacagattttaaaagcaaacactcctaggcatttatttgaaatgatacttctaagaagtcagattgccataaatgtttaaaaggcctgtaaagtatacaaacggcgtgcccataaagaccaggaaactctaagcacagtgtaccaggatgaagtgcgaggacctgaggctgtttgtgtaccatctttgttcatagcctttgtaaagttttgactttaatttttttgtgtgtgctttcagttaaccctaaggctgccttcctagagcctcagaaacacatgttgaacagctgaagccgccatctctggttatcatctaaatccccttggacatcagatccatggctcagctcacagtaatcctgagcttccagtcctttggtccagtccggtgctgtaactaaacccttcaatcctcctctctggagaatttcactttggaaacttgatatctttcccagagatgataaattttaagttttgtatatctgccagtccccggcctattgttctgtcattttgatgcatggagcttgtctgttagcgttattaaaaacttatgtgtctcctattattattttattctaattagatgggccatttggaggtttcgtctcctaggagatgcaattgtgcctgtgtaattagctctcttctttaggacagctggctaattcatcaccttggagtgcagggttaggttctcagcccacctgtttattttatgtggccataggcacttagtgggtttttctaatacttaatctctgtgtctgatcttttccatgtgcacagagagaaacaagtgcaccctgtcactattccttatttttgttagtaatatgagtatagttaaatcggatcctctttgtgagacaggatcttatgtatctcaggctggcccccaaacacattatatagctgaggataatcttaaactcctgattctcctgctgctcctcccagggcctgggataaccagtatgtgccacacctgttttgtgtagacttggagatcaaacccaaagctctgtgtatgctaggccagccactctccccaatgagccagattcccttccagccccgagtctagtcacaagcacaccgcttggacaatgttttcagtaacctatatttcgcctccatctttgctctttatagaagatgatttatgatttacataagacttgtcttcaaattacttgaaatcagtttacttgtcttacgccatggcacttgatgaatcagctatatttggttaattattttgtaaataccactggcttccatctgtggaagttctacatccacaaacctaacgagccgctgattgaaacgcagtccacagaaaactgcatctgtactgaaaaagtacaaatctctcccttgtcatcatctccttgcacagtgtgctctagcaactacttgggtaacatgcaccttgtagttgatgtaagtagcttagagatgatctaaggtacatgggtgtgagttatagacaagtagtatactgttctatataatagatgtgagcatatatagattttggtgtccagcagagacatcaaaataaaggtgtaaggactaaggggttggttcagtgggtaaaagtgtttgccatgtaattataaggacctgagtttcaatccctagagcctacataaaagctggatgaacaggacatgtgtctaacctcatggagatgggaggcggagacagaattcccagcagctctgcaggccagctagcctgccgtgtgtgtggtaggaaaacagtgaggagatgcctgtctcaaggtcaaaggcgaagactgacatccaaggctgtctcctgacctccatacacatgccttggcacacaagcatctatgcaacacacacacacaataataataataataataataataataataataataacaataacaataataataaatcaaataaaggtgtcaatcctgaagagacagggctgttctagaaccatccaggatatgtcaccacagcacaactgagaagagctggttgaagactatgtgacaaggttaaagcaccaatataagaggaagtgtctgtagcccaggaaaccacactgtaagaaaaatagagccccataagcaagataagagtatgcaacctccacacactactattgggcccattcaagatgtaacacggttcataagcttcagaatgtgtatgccaaaagccaactgtcctggatccttaagtgcctgtggctagatgcctgggagcctcttccaggctaggttgaataatgaagaaaggacacctggggtgggggagggaacctatgtggtaaaagtttaagagaagagtattacagtagactaagaagatctaacatggatgcagctgagagaggaacaggctggggatgaggggaggagaatagggcatcctggagatatcccagcaccatgatgcaggccaaaagcccaatggacaaactataatcccagactctttgttgtggctctccttactgtggatatttgacgaggaaaaacaaaaaaacaaacaaagaagcaaacaaacaaacaaaaaaaacccaaagaacaaaaaatcctaagctgatcccactagttactatgtacaatgtgatcaaatcaaggttgatagctctgaccgacttaggatgttccagccctgtgggagagagctgaccagggagtgtagggaaggacttgatttgctcatacttattttgtaaaggatgagaacttcatctctttcttgataccaacgacatcaaacgtattctttcagtatacttacagagcatagttcaaaatgttgatcacatagtgggcacattgacatatgcctaagtattttcgtgtttcaaatgtataatatatatgttacagtttccattttggagattacggtcccaaaatgatttccttttgggatggggggggggggatggaaaggtcttgtaattgcttaaaagatctttgacttgaaccccctgaagttgtggtatagaagggaggtagagcagcctggtttagtagaaaagggcttaatttgtgggattttgttgtggtttggaagtcagagtttttagttataatgacttatagaatatagattctggcctgagctctccccatccccagtgatgctctacaaggtgttgattaatgaaatgggcaagaatgcatcaaggaggggtctaaggaggtcttaaataggcactcagcatgtatgaccttgacctggctttctattcttcctcacagtgatccccaaggtcaccaagcacctgctctcaaaccctgtgttcacctgcatcgtcctggctgcttgcatggagattgctgtggtggctggcttcgctgccttcctcggcaagtacctggaacagcagtttaacctcaccacttcctctgccaaccagctgctcggtgagtgggtctcattcccctcctgccataccaacatgctcaaagaatgcacggagctcaaaaatatgcaggactgtgctaagccatggtatatgtgtatccttttctatacaaggaacttcagagtgatattttcacaactattaaaaacatactagagggcccgtgagatggctcagcagggagaccatctgttgcttcaagctgatacccacattcaatacccagaactcatggatggaagataaactctactccaaatttatcctctgatcacatgggtaccatgacccatgatacacccaggcagagtaatactactaaaaataaaaaaaaaaacacacattataagaaagaacaaaggtatataatgtatatgtagaaagcattgtgagaggccaggaagttgtttgactaacatgaatgggaaatttcgaagcatatataagggaagagagcaatagaagtccatcttaaaagattagcagatatgtattagacaatgagaatgatcttagcagcataagatccacacttcacaaatacagagctaaaaagatatatccttgtgctggagagactgctcagtgggtaaagcttgctgcacaagtatcctaacttccctcgattcccaggaactcacctgaagatggaagaagacagccagctccacaaagctgtcctctgatctcagaatacactatatcaccccctacacacacacatatacatgcacaataatatttttaagaaataaagttaagaaggcatgcccatgctgatgaccttgcccatggcaggcataactaatggatcacagaatttttcccaatgtgaggcgaggctttacagttcttctcaccagacttctaatcattggaagttgagctaagaaaactcatctgccctcatgagaagcagcattgccaaggtggggtggtcagtatgtcctcagagtgtatcttagacttgcttttcgtgtgggaggaatctattcttcactctttgcgtgaccaacaggctgcattagttgagttgatcatctcagaacatgactaagaatggcgaaaacatagcagttgaggaggatggaagtgtccaccgtggccagttctgatgtaaacttgctaggaatgatacataattgatgatgtgctgcatgccattgagggctgaagaggggatcatggttaatactatagaaagttaaaacactgaagataaaagtagatttctaagccatgaaacagaagggaattgcagaagagagggttcctgagtggacagcccttgatagagagcccagctgttcctctgaaaaggcagaggagggtcctgtgattaaggctgctgagtgcagtgtatggccaggtggcagagagggctccaacccctatacttcatcttctttgtcaactaggagaaataggagggtgttcttagcttaccctttaacacctcctggggtggggctggagagatggctctgaaattaacagcatgagttcttcttgcagaggacctgggtttgaggctcactttatggcccatagccacccatagctctagttctaagggatcttacaccctcttctgacctgcaggcacctcgaatgcacatggtggttgcatgcatatgcattccggcaaaacatggacacctaaaacaaaaataataaatctttgataaaatagtttgattagtaaagcccctactgcctgagtatgaggatgtgagcctgtgtgcccagcacctacttaagagtctggcaaggcagggcatatctattacctcatgactgagggaagaagagacagacagatccccagagttcactaggtagtcagtccaaacaactggtaaactcttggattcggtgagctgctgcatctcaaaaaataagggggggggggctggaaagacagctccatggttaagagaactggctgctctttgagaggacctaggttaaattcccagtatgtacatggtagctcacaactgccaataagttaggtttcaggggactcagtgttctcttctgccctgtggacacaaggtatacagatggtgcataagcatacatacacagggagaatgcccatatatataaaataaaatacaaattttaaattaagtggagatccatgggtaaaggttccatacttcagctgccagcacctatacacccacgtgcagctgtgcgtgcacacaaacacgtatgcatgtacacacacaaacatacaaacagagagagagaagggggacagtatatgtatagagagagattccccattgctttacaaaatggccaatcaatgcaaaggatgcagaccagcatgggtgatgagggacatgcacattgaaatctatagggggcacagtgatgcaccaaccagatgatagtgctgagtgctggcgagaatgaggagcaactggaacccacactgcagtggagatgcccggggagcgagcctctgcttcgggcagtttttgcagcacccattaaagctcagcatatgcctgtgctgtgatccatcagttccgtttctgggcacttatccaacagaatcgagtgtttaggtccactcatttacatatgcatatataacaacattcagagcagctttatgcataatgatctcaagctggaactaacccaagtgtctgtctgcagcagaatgggtaaataagctatagactgttcattctatacgacacagctcaggaaaggacgaattctcacacagccttccatgggaatgtgtatgggttggaagatgtcacacacaagagaatgtatttatgggacttaaaaaaaaagatgaattgccaattaaagtaaaagaagccagagccacagttgtccttgaaggttacagctacagagaggtacccaggagcctcctaggcagctgcaagtgagtgtgtgtgtgtgtgtgtgtgtgtgtgtgtgtgtgtgtgtgtgtgtgtgtgtgtgtgtgtgtgtgtgcgtgcgtgcatttatgtatgcctttgagtctagttacgtggaatatgtatatgtgcatgtatgtaatgtacctgtatatgcaggttcattttcacacatgtgcatgcggaggccagaggtcaacagtgggtgtcttcttcagtccctctctaccctagtttttgatgcaaagtctttttcacactgaaccagctggccagcatgctgctgggctcaacctgtctgcctacaatctagctctgggattccagacatttgcctcttctcctggctcttatgaaagtgccaaggatcaaacactcccaagccccaaagtatctggagttgttctaagcttgacttgaatgctggttatggaggtatctgcatatccagttttccaagttggaaagtttaccaggatggtctttgtgtgtttcataagatgtaacatcacagttttaaaagaaattcaaccctggccatcatgataacataccacagttttctctccctggaaactgctgggcaatgcaagttcaccctcccccactaatcattcttaccatccactttttggtaagtattagtaaaatgcagtcagcttttcaatgcctgcaggacagaggagaaaaacacatccccctgtaagagaagctatagcttttgttgtctcaagaatctgggcattagacctccagcacccctgggtttatctctcaactcctggtttctgtgccaatatatcttccattttagttgttcttacacagttgcatctccgggaccaagtcctattttagaagaaatgcctaagttttctatcgacaaacaaatcaatagtctgcagggcagaaaggtcagaaaaacaattctactgcctagcgtctgtttgtttcccagtaattcctgtgtgctggagcgcttaacaaggtggaaaggaaaagggggcggggcttcttcatattctctaggcaggccagcatcaggcatttcctgtccctatgtctagcctgtggcagagatccagttagtatgtactggggagagcacactgcagagaagctggcagggtacactaggggaagctgatgtaaggagatgctctcagagtagctcctgcactcttagacgatggtaggcatgcacttatccccatctatacattcaaggctgcaggccacccataaagtcttcagcagatgggtcagagttcagagaagagcagtgtagacagtccaggagccgatgatgttgatttatgagtgcagattaaaagagcccggtctgcataagttaatctaataaggatgaagttttggtcctgaaagtcctgacaatagccatgggtgttaaggacatatacacacatcagggaagaagagagagaaaagctaatagtgactgggagaaaaggtgctgaaatcctgttgttgccatggttaccatcatcaccaggtgacacccccactgtctcaactagaaaatgaaacaaagcccagggtgctcgctgggagtgggcatgtggttgccaaggcttattcacatagttcccatgtgcttatagattcattcattctcaaaggggtgcctgaatgccaccctgtggttctgtattaggccctggggattgggctggactgaatgggacctgaagggtgctccctccttctggaaacttcatgctgatagaggatgagagcaagaaacaggatgggtaaaaataaacactgccgctttagagggcagggagagccatggaaacataaatcctgatgggggtaacaggagactgttcctgagcccagagctcctcaagtctaactgaatagcctaccatgggcatccctgtcccttcctcccaagtgtgtgattacaggggggccaccacctgccaaggtttacctggcttctgagaccccaaccctggtcctctctcacttgtgtttatccactgatccatctctcctgatcttaagtcccctttccatgtcacaagaggtgtgggggctggtgaagcctcttgcagaggaggaaaaccagccaaggaaaagtgggcaagaccatcctaggaacagaaccaatgcatgagcaaagtctctagcaccgggggcacctagcctcatctagggagagaacgtaggaaaactggaatctgcggtggccagtgacatgggctgaggatggaagcacacaggacaaggtcaagatctccataatcataccgaaggctggaaaactaagcccagatgtctgaagcagccagtgacacacaggtcctggtctgttttaagtatagtcagggtgttgtcttggcaagctaagccttcctgattatattttcttaccctaatatgaaaaattaatttgcattccctcagcacttaccagctggttgatgtagtcgattgacctgagggtcgtttgattggcaggaaggaggccgagtagactggaaaattagccatgcataatctacaccatagataaatggcactcggtaatttaaagccaagtcgtagatgaaatgaatcagaacagagccacagcaaacaggagattggaacagcagggtcctttggttctctgacaacaccctggttctttgggagtcctaggaacaggcttcggggctgctgccttggagatagctctgtgcataagagaggaagagagagagagagagagagaaagcgagagagagaaagcgagagagagaaagcgagagagagaaagcgagagagagaaagcgagagagagcggcagagacagacagagacagagagagacagacagagagagacagagagagacagagagagagattgtatactcaccaattattcaccaagtgctgcagaacgtagtgatttgattgacactgcttcctggggcatagctgacccggctaaatgatgcccactaccaacttgtgagcccttcaacctttgggttatacagccctggagcctaccatgtacctttcttgcctcatgagaaaagaaaaattctcacactgtgtatgtgtgtgtgtgtgtgtgtgtgtgtgtgtgtgtgtttgcacacacacatgtaaatatgtatgtatcttcaagtgtgtgaatagggagtgaatgcatgtgtgttcatatgcacaagcatgtctgccactcacatgtgtggtcacatgtgtgtaaacatcatgttaatgtccatgtcctcctcagtttctcagcatttaatcttctgaggcagagtctcttgctgagctttccagcttttactagtctatccaaatgacttgctggaagggtctcatccctgcctcctgagtgctgaggttacaggtaggccaccaggccttcttagcactcatgtggattctggcgacctggtctccagccatcatgcttgtctctttacctactgagccatctcctccaccaaaaagctcttcagttgatcttaagtcccctttccaggcctctttggaaatgcacagagatagttgagtgccagggtgcttaaagacctgagttccacagtcagaatccaaataaaaccatcgaacaaaaaagccaaaaagaggcagtgtctcaatgacaggtgcctgagaaatgtcacccaaggatatcctctggcttctatgtaacacaggtacatatatgtgtacatacatacaaacattcagagagagagagagagagagagagagagagagagagagagagagagagagagagagagagagagagagatcacagagaagttaaacctggtgggatatgccttgaatcccaacacttgggtagctgaagtagaaggattgccaagtgtttcagcatagcctgatctacagaataactccaaaatatcataaaggaagaggagaaaagcaaagaaagaaatactaatgcagagaccatatctttgctccctaatatttaatctcctggattttactccgtagtccccagctttctggattcatctcctagttggctgccaattagctgtgtacatgcacgctctcagatggcaggtgtggtatgccagatgtgtgcactttggctcacaataactgtcttctgttgttttccgagagttttctgggatcagacataagagcctccatgaagactttagagtcacatgaagacacagggcccactgatatccaccagtccccctttcctgctattcacactctactgctctgcttcctcagggatgacggcgatcccctgtgcctgcctgggcatctttctgggtggccttttggtgaagaagctgagcctgtctgccctgggggccattcgaatggccatgctggtcaacctggtgtccacagcctgctacgtctccttcctcttcctgggctgtgacacaggccctgtggctggggtcactgttcgctacggaaacaagtgagtagctaaagttttaactcgaccctgcccaggcacccctgggccaccttcaccgtggattcacagagagagctcagccctgcccagatccacctggaccctccaccacaggctaatagagccaacctggtctctagtgatccagagcagaggagcccagaggccttagcttcttacttgcagttggaaggctcagcctgtcctctggatgttgagctgttcttttctgcaacaagacagcccagagtacagagcggtcattcattctctagtccacttgctctttctgacatttgacttcaggaatgatgtgaataaaaatgatgtggctaaaattaaaccctatttcaaaatttggctcaaaataaaagacagaattaacttcagtaattcctacgtgagtcagaagcccccattcagctcacacagagtcagtcaggcccatggtgcgtgtgtttaagtggtagtggaagagagggataaaaacaagttgggaaggaagacagaaggagcaggaaccagcctgttgctacggaatatcttttcttatgccctggttattatcctgggactatggtacagtgtttagagcgattgttgtttaaataaattatggaactatattatctctatgtctactgtctccttccctatgggactcttgagaccaccctgagctgaagagtgtagcccagaacatgctgcatcgtagctgccctgcaggttacacacccagactcctcctccaggcagaccactgggctgcaaggaagcctggaaatgggccagaactgggctcatctactatccattgaaagtgaacaggaagagtgggaggcaaagaagaagcagcttcttacagactgaggagccctccatgcagcccccagttcttcccacatagggtaccctccaacttgaacttggctctaaacagcagacatccccatgcaacttgcaaacaataaactgcagtgattagaagcacacacacagggtcccactgccatgacatcatgctgtaaaagtgaaaaataaaaaaaaaaaattaaagttcaaggcctacctacagtcatactgcccaactctagcccatcctcaacagtcagacactacacacgtctggacaaatgagtctcctgtctcagccttgatcccccctttggtaatgtttgtggggttgtactgagaacaaacaaaatgatacatagaattccaccaacagagcatgagcatgacgaaagcaaccaaatgtcttcatgtcacttgcgttatcaggaaatactctgagccttaggacagagtaggagatgagagtactgaagtcattcccttcctctggggctgcagactgggctctccctatttgtctctttctcagtttgtacactcctggtagctgcatctttgtaatgtagaagcaagcaaaaagcaccctagcacttgtctctggatattgaaccaatcagaggcttacagccaggttgggcatcctgtatgcaggagaggaagaaacaaacagaaggggtggggtatccagcagcgcaggagtagttgcgggtaaggggaattgaaagaccctaagctgagccccagctgccttcagtgcaaagagcacatagttacaaaaggcaaaacctcactttgggaggagcccagaagtcatataatcagctacctagcccagtactgtttcaaaggatacagactaggctctcagcaatggccctgcacaagcacttgaaggtcagccaggaataagatggagggaagagaccagccaggtaaacaccctgaataagggcaccaagaagcccatcacagcagtgttgtcaccagtgttagccctgcttctaacaagtccccttcacccttcttttccagctcagcacgtggctcggcccttgacccttactctccgtgcaacaacaactgtgaatgccagacggactccttcacgccagtgtgcggggccgatggcatcacctacctgtcagcctgcttcgccggatgcaacagcacggtaattgaaaaccttgggatgcaggggagagggtaggctccaggcagccacaggtgctcacaggcctgtcaagggccacggtggacagtaccgtctttttgccttactgcagctgttcctttaccctgacccatcaggaggacaacaggacaaggcagtccctcaggcctttgctgagtcaaatggacctctaagacactagatggagcaagttaaagtaaaaatcaaaggccactatgtatacgcagctgggaaggtggctctgccatgagatatgcacaaatgatggcagggaacaaggctgtgtatgatagtggatgaccagccacggaattctggagaaatgggaaagccgggaaaagccaaagactaactgtaccttagctcgggtccctttgcctctttcttcccaactaagtgtcccccaccagtttctttcttcccagagtgttatttttatgtgttcttctcctccttaacatgaatttttaatttggccaccagtctgctgtcttaccattctctgtgtggacatctggtgccaaggaacccccatgccgcctgctttctcccacctcacaggtgcctctgccccttttctttgtctgaatcacactgccactgtggctctgcaggctggcctccttctcttgtttagacctgtccagttgtcatctagctatccttccaggacaaccctcttctactgtcttccaccctacagccagaaggatttctgtgacactacaaatgaccagctcacatgctctcctcgagggctctgagcctggtccatgtccatcctcaactctcatctccagctgtcttcttttgctctcagtgactgttcagccctctctcttcagttttcttctcgtacttctctcttcagttggacaactcttattgatccctccataccctattccatagctcgctactctaaaatgactctttatttctcccatcagagttcttgactttgagtgttcaggtacctgcttcttcctggatatatttgtctctttcacgataacaatcttctagaagtgtctgtctttgatctttgggtttcttcaactagggacattattgccccccaaccgtacttcataatttctcacacaatgcgcagatgggaaggaaaagttaatagccacgggggctgctttcagagaagtaattcagtcatttatttcctcccggccctgcctcctgcatcttaaagagcaggagttccctgaaagaaaaagaaatgaatcatttgttttcattttcaaagatttcatttttgcttgcttttaagatttaagattcctggccagttattaacattttctataaaggaaataaatcaccagagattgggggctgggaagacctggtttcataaagtagatgataaagcaatttctttatgtgagtagaagtaaatattaaaagggggttgggacctggaggatggttcaaataaaaacacaagctattatttctcataaggacaacttcattgacattttaatatccaagaagttctgttaacagaccgtttccgacattgtcctgtgatgaaaaaacctaagtgatccaaagaagccgtgtcctgagagccaacaggcctttactctaggggcgtactgacccaaccctgtagcatttgcatttcttccactcttgcccagatacagaggtctgttgactcgcagtctttccaagccgatttgattactcgcagtggctgaagctgaagagctagagggcctcagtctaagactgagtcagctagggctgacttgggacatgatgctcattccccagacacctgctctccattcacaccttgcctactggggtggtctccgggtcccactcttttcccactaaggcaatcagctggatggccctggcttcttctagctgccgtaggtaagacttggagattagagtcctgttcatagtaagtggggcccttgcagtagttgagccaaaacaaaacaacaccaacaacaaataaaacaaaacagcaacagcagcagcaacaacaacagaaactgctgcaggctttgcaggaacctcaggctgagagactgtcaggccaggtaatgggcccttcctacttcattcctggcatttaagagcttggcctggagtcaaaaggaaccttgggatgacatccaaaaagagcaaaggcaatttgagtctttagactctgcagcagtattttgaaggaacgccaaacaaaggcttacatttctggtgtagggcacccttccccctcccatccccttctctctcttttttttctctaggtactcagtacaactcttgcccacataaagggtccccttgtccctcccaatttccatggcttctttccctgtccctagagagctggctgactccgtctgggctcagtcctttcctgtgtgtttcctgggctcttttgtcctgtctgtatctttgcctgcacttttccataggaccccatgccagcccacaaggatcacacaatagagtgtcatgggattctgagaccctatgagccaaacctggaatctttctttatactttgccactccttttcagaatgcccacttttatcctacacgaaactgtctttcttcatgaacactactggcacataataacactgagccttcatgtctgccctagctgcctctccagcctcaatctctcttctcatccctcttctcatcccagtctcctaaccagccacttgttaattgaggctctctcaatggccgagctctcctttgcccctgaagctctgcacttgccattccttttatatagactagtctcccctcgtgtatgtaagtcccatcttgtctacccaccagggctcagcctctctttaccttttacctgcctcttacagagctgtttcctacctcagcactatttcaagacaatattaatgtccttccaatttctacctctcccgttcttacctggcaagagtcagagctcatctgttccaatggctcatttatttaagcatctctgtccctcaccaggggtggagatgaggctgtgttgtagacctttgtcctccacagagccagcttaaactctaggtaaagcctcagactccctaaatgtccctgggtgatcccatgcaacctcaatcaggtgactacacagtataacactcctgggtagcagttggcaagcaggtagaccagatggttctaacttcaaggcgcattcttatccttcttcaggtctctgtctgtctgtctgtctgtctctctctctctgtctctctctttgtctctctctgtctctctcactctctctatatatatatatatatatagagagagagacagacatataaatatatagagataaagatatatatatatatatatatatatatatatatatatatatatatatatatatatatatatatagagagagagagagagagagagagagagagacagatagacaaataacaaatatcagggcccatacaaagtctatcccaggcctgcattagatgcaaataagtcaaccaatcagatctttgagatgctaatgaaacacagtaagcatcaggtgcccctatctttactttctttagtatctcagttggggtgctatgtttgtttaaatttcttctttcatttcccaagcaatagcagtgaaagtttctagcccaaattcgctgttgtgtttctaaatcctgtcattgcctatggtgaggggagatgacaaaagatggagttaattttatcagcctcctttggtgtgaatatattgctcagattgtttgcatacctttcactttcaaaagtaattattcaagcagaaagcatgtatgcattatgctggaagttatgtccatctgatggactgaataattgcctcaagagaaaaacagcttttattagccaccaataggttaaaagtcaacgcaagccaagcacagcagtttgtaaggtgtaagtggcagatggctgatctacccccatccagaccacacaatatttaccaagtgctgtttgagcaaagcatccagtgtattctcagcaaggagaaggattctatcctggggcttgctgggaactggtgattccaccttgcaggcctcaattcagctacattttagaatccctgacttccacaatgaagggtctgagattcttccttattcttaaggaatttttatgtgatttttttagaagcctctcacgtgttcgtagtatgtgagcaggattagaaaccattgtggtaatagactgtttctacaccttggccttgaggatgtcttgaggtagacaattctttctccttaggagctgtcctgtgtaccataggatgtttatccacattcttgagctttatccacacagcccccaactttatctgacaaacatagatgccctcagacatactgaggtgtctctggggacactaccgctctagaagggacactccagccctagaaaggacaaggcatgttctgagatctccaacctctgagctactgctgctaatgccctgtctctctcacaagccagacagtattgcaagtgccctgtgagcccatgtggcccaagctgctgctgcgtgctaattatgcatgcgtaccctaaggaccaatttctcatggccaagccgtattaaatcaagcatttagcttggagattttgtatgtgattttagatttgggcctctgtgagaatgttggaagatacccaataggtattaaacagccaaagatgtggcttgtccttcattattctctatgtacccacagtcctcagcaacagccaccctcacacctcagccactctttcttctttgtatatttccctaagtgatcccacagccttgagttgaacaaagcctcttctatagcatgaacagatccccaacactgatttaacaatctgtgcttattccagtaaatggcttttagagaaaccttgggaatagtccaataaagccttgctagagtttgacccagctgtgacacctgctacatcccaggccctgtgctaggcattgcggaggcagagatgaataagatccagggtctgtgtttgccataaaatctactatggtgttatctagaagcttgtacgagaaagtatcaaaaagcaaaactcagtccagctttacagttcagtgaaaagaacacatcagaaaaccatggaccatggaagaagaatcttccagtaagggaaaagaaaaatgtgaaaagatacatgacttttttttttttgtcgtctcattgctttgttccaattctcacttttgtggggtgttttttttttggggggggggaggttgtttgaaagagagagaaaaaagatcagaaagtcgagtgggtaagtagtcgggaagcttctggaaggagtcaggggcggaggaaacatgatcaaaatatagtttaaggaaatacgtaggtgaataaataaaagttaattttataaatatatatataaacaatgaatgaaaaaaggccataattttgaaagagagcaaggaggggcttatgggagggcttggagggaggatatgaaaaaggaaatgatgtaattatgctataatctcacaaaataaataatttgaaagggaaaagatgggggccctgaggagatgtttgagtcagcaacgtacttatatcgtgcaagcttgaggatctgacttcagtgtcctagaacccaagtaaacagaggagcacggcagtgtgtgccacagttccagggctaggaaaaagaaagcagaggcgggggatctatgatgagccacgttggtgggcataagattcagtgagggaccctgtctcaaaaccataagtaaagttgagagtgattgacgaagacggtcagtgttgacctatatgtgcacatacatgtgtacataccaacagaaagagagagagagagagagagagagagagagagagagagcaagtgctggacaactatataagcacatgctcgcatccacagatgaccacctctgactgggaattaagacaacagtttttgttactttcttccagactttctatatattttggaattgtcccgaaatgatcacacattatctttccaataaggaaaagctttatttttaaagtccaatattaaaaggaggttagatagaaatatatttaaatataaggaagtagctaggtagaccagttagtgtccttgtgatgttatactccctagggtagaaattaactctgcgtgagactggatagaaggagggagtgggcatttatcccagggccggctgttgtcctgaaagtgagcaaccatttgcctgatgggcaagcctggaaagacattcttgcctatgtgggggagcactggggatgtggatcagtacgaaggtgcttttgtaacttgcacaaaacttgggtacataataaaatttttttaaatatcaataattaaagtgtttagatgtttgaaccagtgtggcaggatttggcatctggagacagaacacaggagggagagacacagagtctggggtccccttgacctgcggtcacatcctcccctttagtgtggtcctctttgtcccacatatggtggtagatccagagtcctgatcccccaaagagcatccccttggctgccgtccagcaggaggccccacctctgctggtccatgtgacaaatacaatagatgggggtcttgctttcttcttggcaccttttctcctggcctttatctttccgttgctgaccttacaagcaaagcagaggagagagtgtctttcttcctgcagtttttcagatatctctgctgagtctggtgggagttcactagggttgttcataatgaggaacaaggtctttgcccggagacaccagcttgggttttgttcctggcgtcctaataatgaagcataaaggactggtgacatgaccctcagtacacagtgacatttctcagagtgacagcatcttcctctgcctggattccttcacggctcactaaagctctacacacacccttctactgcttgttactgcattttcttgtgtggttgacatataccaccacatcattacttaaaatagtaataattaatacattaacttgaaaaaaatgaaggtctcccaggcagaatcagggaagaacttgacttatgatgacactcacgcagaaaataatccctcctggatcagaaatgagggaacaatcacatcttcctatcttaatgtttccagagtaaagaggctggcctctcacattttaccgcaacattttttttttttttaccaacagtagcatcgtccctcccataccacacccttacaaaagtaatctgtcaacctgggactctatttcttcagtcccattcataagaaatgacctatcagtactgagtgatgggaggaagaaaacagaagcaacttcatttgccaaaatttgtgaaacacgcctgatgagtgtcttgttcttgtagaatgagctgtcaaaatagcatgttcgccatttccttcatccaaaaaataaacccacatctaagacccagggaataattgttctgcatttatggtctccagcttttattgcgattatttgttcctgccttgcatatgatagaaacgtttctcaattaagtcagtgatagtgtgtggaatcacaatgcaacttgaagacatggactagtttaacaaacattgatttctgcttttgttttttcggttttttaaaattttgctttcttttgtatttttaatggcatggagtgcttagattcttaaaatagataatacatttataagttttaacatcgcaatgtagaaagacacattatgagacttcatccctcctcctctgtcctcccttcacccacaccttagcctgccagtagactctgtcactggcgcaggcatgcagctgagtgtcccttaactgacattccattatggtaattgatggtttatggttcttataggtgttataatctgtgcatatatcttaaaagatgttagtaaattttgatcaagagaaatgcttcatgggctggggagatgatacagtgaataggaacactgactgcataagcatagggacccgaattttaatacccagagcacatggcagaacagggaagcatggaaggtgcttataaccctgttgccacagcaggcagaaacagctgaactgctgatgatcactgacccaccaggctagcagaagcaataaggttcagtgagagattctagctcaaggtattaaggcacagattggtagtccaggacaccagctgttctcatctgtcttctacatgcatggacacgtgctcacagacacagttagttatcttcaccccccctctctctctcacacacacacacacacacacacacacaaagtatatctacaggggactcagagggccttggagatgctgaaagcattgcattttggttgtggcttgtcccatgaagtcatgtgagtggtatgattcgtgtcagtgctcagaatgctttggatgatggcattctgtatttcacattctcacacactcttccagatgttccatgtacctgtaagaccctacttcgttcctgtgatttagatttttaggtaagggcttatgttggaccttattcattcatacaaaagaggtacttttttttgcagctgtaacctcttctatcatgttgacctgatagagtctgttaaacaagaaatagttaaatattctaatagccatcccttctctcaagccacggttagttcacattactcatctgtcactttgggcctgggcaggcctatctgctgggtaagttcttatgaaatttacaagcctgttcccttctgtcatcttgttcaacgggcttgtcaagccttctctgtgagcacagtggccctctcattatccacatggaggatggcagggtattttaatgacaggaaatctagacactggtacctcacattgtgacagcagacagagaattcaattctccggggacaactgggactacatttcttcccagaaaaatcatacaatgtgaagacaatgccttgaaaagggggtttaaaacccaaccctcattggacaaaagagcttacatcttgtaatcaatccagtacttgaaaagagaaaactacatagtaagtttgaggctagtacaggacacttgaaagaaagacacaaggaaggagggagaaagagggggagggaggaagaaagaagtcagcccctagccagattgggaaacacaaatgaactgggaatttagtatactttcttagtacttaaccatacaggacctgccagagaaagctctagagtgcatatctatcattcagttagttcacagaatgttccagaagcatctgtagtttgcacaggacataagatgggagaacatacatctggcctcctttattagactaaggtgaaccgttttcccatacttggccttcctctcttctcagacttcctactgttcagagcccccacaggtttggagggttccacaggtttggaagttctttagtaatattagctggaggcaaagccccagcttcctatctctgagatgataggataaagccccactggtaaaaaccatatgcctcaaatgtgcatgcttggaaaggtgaagctgcaggtgactacccgaagttcctcatgccacatgtgagccttagtgaagagtctcctaacagtcctgggcatccacactcttcctaggttctttagcaccagatctcttgtcttctaccacctaaccataaatgagcttgaacttttaggacatcccacattcactgccagaaagcctacagggatgccctgtgccagaccactcactgtcccttcctcaaatccaactgattcatcaaatagaaaagtatatgccatctgtctggctctgacctgggtttctaacctcttctccttctgaaccctttccacatgaatcagatccggttgatcctggtatagatcctttggaaggattccacccatttactgctttccgtctttagtgggagtaagagagcacctccctggtcttgtgctgtcctccagcatccctttctatgtgcagcctgtgcctgcctcgccgattctattcagggtactatgggaaaaatgccatagacagagtaacttataaactacagtaatttctttcctatagttctggaaacccagaagtccatgatcatgacactggcagattcactacgcagtgaatctggttcccaaatgatgtcttgttcctgcatcctcaagtatttgaagaaatatggtagctctctgaggtatcatttataaaaatacttgttcatgtgggttctatcttcatgacttcatcaccccacctagccaatggcttcatcctcctcttgagtggttaggtttgaacagacaaatttagagaggacacacattcacatccatccttggccagatctgcttgttccccacctgtgccctagctctgtgccctgcctgtctgtatgccccgttgccttagagacaaacctcagcatcagacagcactacttccttgctctgctcatggaatgtcagctggatagatggttaactcatctatgtggggctctggcaaagacaccacgttcatctcattgccttagagattattgaagatctttcactaggatttaggagtttccaatccaggtaggctgacttgccagtaagccccagggatctacctgtttctgtcaaccactgtgctgggattacaaacatgggccaccattcccagctttatacattggtgctgagaaataaatccaggtccctggggctagaggttaggagcaattgttgcttgcaggagacccaagttcagttcccagcaccgaaaggatggttcacaagcatctctaagtccagttccaggggatccagtgctctcgtctagcctctgtgggcattgcatacaaacagtgtacatatgtacatagaggcaaaacacttgtacatattttttcagtacatatttttatccagctccttgtgtttgagcaccaagcactataccaaccaggctatctccccagtgatgtcatattttttgtcaaatataatataatggattatagcttaggtgtagatccaaaataaggatagacaccaagatgacttgataaaccaaacaaaggtaattagtcacatggcttactctcggggttctggcttgatcactgcattgcagcacccctaatatatacccgtgtgtttctccagaagccatgcaagccagcattcggttcctgaggcatttagtcacacagtgcaacagggactattccccatttatacttggttgatccaagtctatgtgattataaggtgacagtcacaagcctccagtcacaaatgtcttcccagccaagccaagtgatcaaagagaatgaggagagcaactggagctaggtcaggtcttggacccttttaggatgtggaaggcatcaggacataggcaattcattcagaacattttctgagtgtctattgtgagcccaaacctgtctagcacgaatgagaatatattaggtaacaaaactttagtgggctctcttcattagccttagagtcaggaggaaaagagtttgatgtgagggtgggtggtgtcaacattatcacctggttcctagggagatggtcatcattactaatgggaagagtaggaagtatcacgtggactgggcagagaaacatcccatatatgcgtttggaagagtaggggcttaatacagaaactggagtaggagagaatagaaggggaaagctctggaagaagtgaaatggtagagaggagatgaactggctctgtagtgagttaggcttgattgcaaaacccaaaaagctgtatccgtaaactgtatccctaggcttgctctgatgcaggaccagaaaggagcatgtaggaaccagagtgtgtagggagagacctgaggagctaggtcacaaggagtctttgctcccttgtatccagccttagttctagccaatggtcttctgagggtagtgccgcttctttacttcataggggaggggaagtgactgtgtctgggcctttgtggttcctagctgggatggatgcctctaacaagtgacccagtaacaagagcagagaggggtattcacaccatgtgccttgggatagactggaggtctccagtgaaatatgtgaatcacacagaagcagctttgagtccagacttaaacagaaaggggtataggaagagaccagggaacgcatgcaatacaaaggatttgttctgtggatctaggttggttagaaccttctccatcaccccttcttcctaggacagaaaggagacacctctacagaaagagatttctgggccagcacagtggtatgtgcctgtagccctagctactcaggtgaccacagctgtaagatcatttgagcccaagagtctgaaactagactgagcaacaaagccagacttcatggctcattaagtacaaagacaagattatatgacaggaccttacatatgtaatttctatacatgtggctttggtgaactgaagatgattgggggaattgtgtctgcaccaaatctgtacagaaattgttatgtcatattccctaagcaatgaatacaatataatgactatatccactgtgctagtattagatataaagtcatctagagatgattttatgtatacagaaggaagtgggtaggctctattctttttatcagggactctaatatctgtagattctggtttctgtatggtatcctggcatccaatatctttggatatgaaggaaccactgactataaatttctgtttaaaaactgatgacttctgtgttgtccaaccttctcccgtgtctctaaatgtcttcaaatgatcagctcaaactagtccttgggccaaggaggcatattttggggtagtgtggggtagtgtcctgtgacttccggcttctacaaaatgctgtatttctttcctgcctagctttcatccacactagagaaggaactctgcaagcatggaacagccttagaaggaaaactgtgggaagtatgccccacaagctcagcttgacaccacaacattgctgtgtgccaggaagggagatatagagtatccaaggggaatatggagtagaaatgaagttgaggagagtcatgaacatataggaaaatatggtgtaggaagggaagaaagtctaccccgtagccatgttagcatgggaaaggggagataatgccaagaaagatggacaaggtgtagccagaagaagaaaaagggaacccaaagaaccaaagaatagagccatgggaggcagggagcaacagagatgccatgagaggagcagggggtggtgggctagggatgtggatgccagtggggaacttcctgagatctggctcacactggtggagagggaagccagtcagaatgagctgagaacagggccagtaaggagctgtgaccactgatcatcagcagctagagaagcttgcctgtgacctcccatcatgccatacaagcttctcttggtagagactgggatggcctggtgagctgtagatggagagaagccctggtaaaggcagaggccaacctggccacctgtgtatcctaaacctgtcttctgcatttcctctagtgtcctgctgcattgtgcaagaagtttaagaaagtgtcccaggttgttcctgtctgacaggtcccattgtctctgtagggcaggtgttggtcagggctcagagggatcatgggaagaatagaggaactgctcatctggaggatgaagggatgtggtgtctgtggtaggtctcttggaaaagccaggtaaagtttttaggtatagcttaagtggtggtggacaggtgtcaggcctcagcacctggaaattgccataaacacccaggtatataacaggactatttacatagatacctaccctggcacactatttagaagatgtacagccagaaggtaccatctattccaaacaacaatgcaggaaagccctagtagttccagggtttgagacaccactgaagctatctcatatggaaaaagacaccccatgtctggaatatcccatgatggaagaaagggaaagcagcgaggaagaggagagaaccaagtgcgaagggagaagggcagaagagaagaaacacaggctttatagggagtctgcctgacccctcgggagagtttacctgctaggcatgcgctcagaaagccaatcagctctggaaagaaaagcaatgaatcatttatgattgttttcgctttgtattcattaaaggcctctgcactattattatcgagccttaattggcttggaactctgaacagcctcctccagcccctgctcctccctctgcgatcagaaattcctggagcgagctggcaagcttgcaggagagcaggagagcaaattttgcttgggaacgggggttgctgatgcagagcctctcagaagatcaaatggaacgtggttgctttcctttctcctctctgatcatatattaataaatgtatcccatcagggctctcgagctcctcccggtaagatcctatcagctgccagaatcccttagctcccctttgcttcctcagccactggacaagttttccaggttccttctgtcatcagggtctaccaggcacaatggcttcacgcatgacagcgtgtgtcctttgttctgggtgccatgccaggcactgaaccagcaacaggatgtggggttacctgatttacttcttttaatacacttcggtgtaattataactgcataaagggaagacaaattggcaagtaattacgatgttaatttggcaatgttttatcatattgtggaagcacaatttcctctctaattgtattgggggggacacatttatctacactgcagcttattgaaggtttcttgagaatggaaatgaaatacacaggagacaggaaatccagctctcctccccataaatattactttatttgcatgtgtttttgcagcctcctttaaaaaaaaaatgctaactcgtttattcaggcccaattaatggaatgccacagaatgtataattaggttgtgacaggctagctgatggattgcctcgggtgtggaaaccagagacacccccagtttaaatggctgaaccttccctttcagaacctcacaggctgtgcgtgcctcaccactgtcccccctgagaatgccagcgtggttccaggaaaatgtcccagtcctgggtgccaagaggccttcctcaccttcctctgtgtgatgtgtgtgtgcagcttgatcggggccatggcccaaaccccttctgtcatcatcctcatcaggtaagctgtccctccacccccaagtccctgagagtcagcttggcctatgcctttccacctggcacattttggcagggctccccagcatcggagctgtgtgagtcttgcaagcaaggtgagagggggctgcagacaggaacacagcagctgtaggctaagaggaaacaatcacaagccttccaccaattggggcttcttcatggtacaccaggacagtagtagaagggcacttccatagtctcccaggaataaccaatgaggcaactttgagaagtcttctatactgatctttttggtaagattgttggtaaaataagatgaaaacagtgggctggggagatagcccagctggtactcctgtctcacaagcatgggactgaggtccttccctgtaactcatatcaaacctggacgtagtagatcttgcttataatcgttatggtagtgagattagagataggcagatccctggaagcttgcaaaattgttagtctagcctattcagggaagttttaggccagtgggagactctgtctcaaagccaaaggtggaatggaacaacgttcaaggttgtcctctgacacacacacacgcatacgctcacacacacacacacacacacacacacacacacacaaacacactaaaatggcattagatgagccaagttcttatttttttttaatttattaggtattttcttcatttacatttccaatgctatcccaacagtcccctataccctccccactccactcccctacccacccactcccacttcttggccctggcgttcccctgtactgaggcatataaagtttgcaagaccaatgggcctctctttctaatgatatgtactcactgataagtggatattagcccagaaacttagaatacccaagatacaagatacaatttgcaaaacacatgaaactcaagaagaacgaagaccaaagtatggacactttgccccttcttagaattgggaacaaaactcccatggaaggagttacagagacaatgtttggagctgagacgaaaggatggaccatctagagactgccatacccggggatcgatcccataatcagcctccaaatgctgacaccattgcatacacgagccaagttgttatgcccaagccttgcacttctgttaaatagccatatacccttagacacaacatggtcccccaaatttgtttctgaatcagttacatagacagcagcacttgtcctgcttgcctgacctctcccatgctctggacccttccaggtcatgtgtgcaaaccactctacagacacagaggttaaacacactaaggggtctatggcatgcatgtcataattgcttttgtataagtaagtggctgcagcaagacacccagaattctgtagccccttgtccctgggaagctggcctggaggcagatgaggatgtcacaagcttcatcattcacaatgctattgctatcttgatttgaatgaggcacctctaatagcactgacctatatttatatcctagtgtccgtctgggtccaaaggaagaacacagtgcacagaaaggctcacttcaccacatgtgtaagcaaggccgttgaaggccaagggctggggatggaaatgaggtgcttggagccaccttgattccttgcacagcatcaggtgctttcccaggctttccctcccatgccctttgctggcaacactcccgaaagtagatttataggaagcacttgtgttacccagatggtcattagcagtggcttatgagtgtgcagaggcattgaggctgcaatagcaaattgccatcttattcttaggacgttcgacaaattcatacccagcgctttagacggctgtggtcaaacaagttagtcagtttctgctagtggtcttgaaaagcttataagtccttccagaaatgcaatatgccagtgtgagtcaagcgccataaaaatattcaggcccctgcagtcacctatccccatttgtggccatttatctcaagaaaatacctctctacaaaaagaaaaaaaaactcaatacagacagattttttattacaacgttaactataatagcagaaagacctgagttgaagtagtgagttaaattatgaaactgcagttcaaagggataatgaaaaatcttaagaacgcgcgaagtgtttatgaaatgagccattgaatttaaaactgtatgtggaaggcgattatatataatatgcatatgaacaaaacccttcaggtttcatgtatgggtttatggtggctgttttataagcagtttgtttttcattagagattctcctgaaactgtatggtaatactcacacacagaaggcaccaggaagcagtaagagggaccctcactaccattagttgtgacaggtccacttatttctcacatgtgagtttccacaaagtcccagcctccagattctaggtggtaaacctttggctgtagaagtattagctgtttccaagcctcaacttgataagcagatcatctagttttgcgggacacactggatcccctttaaatgggtcaaggactgatggtctccatgacctgtgtcacatacatctatgaatgcttttttacctaaagcacttgttcatgttatatcaaaaggggatcataatgcatcattccatcccttccccagtccagcttgccattagagaaattctaggcagaaattaggataccctatgcaggtggatcacggcagaaaattaggcccttgccctggttcaaatcagtgggcttattcttatgctgcacagaagttgtcaataggaacgcggaagtaagcgagaagagcactcacaagcatgggaactcctgttcgattcccaggacacacataaaaatgtcgggcatagtgaagcatacttgtaattccaacaatggggaaatagaaacaggagaattcctggggctcactagccagccaccctaacctaattgatgcacttcaggaaaatgagagacctagtctccaaggagatggatggcatttgtaaggatagcacagaagttatcttctggcctctaaacatacaagcatgcacatgtatgtgtgcacatgtatgtgtgcatgtgcacaagcatacacataatgtattaataaagaatgctgaaaaggaatcaggaaagcagatgctcatttggatgatgctaaggtaccactctgagcttttattctaaattactgtaaatattccccttttacacacgaagaaactggcctagcagtggctatgcaactttttaaaggtctcacaaccagtaagttaatgatagcaagcctgaatccctgcttttctgcagatctttcaataaacaccctgcctgagccctccatttcttcataactaagatgtgtggtccttatgggaaccagtttctctgcaggatatgaagcaagatcttagcaccttcctcactttgttcccagtgacacagaagctgaaaggaaatcacattccaagtgataaatagcctagctcattacaccagcatgttttcttgataaggagatttgcctttatttacgtgtctttcaagttaaaccttcaaatgaaaagtgcaaaaactgtagccacggagcaggaacaccacaaggaactttgcttgtattatgtgtgtcttccaaagagtgttcgttctgctcagagatgcagatcttatgacctggaactggtacctggctctctcagccagagtcccaataccactgctcaaaggaagttataacatacttccctgggggctcactcagcagtaccacactctctatagttaaaaagatcccaagaatagattttactgaaagtcttaggatctgtcaacaattataaaacctactctttcacagtcttttgcagagtaccatgacaaataccatagatgtggtagtttatacccaataggaatttgtttctcacaaatcgggagactaggaagttaaagatcagggctaggttaactgatgagggtcactttcagtacataaattctccttgtgttccaaggtagtaaggagacaaaggaccactcttaggttcttctcctctaaggacattaatccactcatgcagaccctggccttaggacctaaacgctgttcaaaagccccactatcacattgcaggtaggtttggatggaataatttggggaagataatgagtctataatatatatgcaattttttttgtttgcttgtcacatttgacctgctataataagaagcccaaagcatgcataccaaggttcaagccaagtcatagatcaatggataactaacttccaatgggctgatggaatcatctaagaatattattctgggactgagaacatcattcagtcagttaagtgtccatcatataagtatgaggacctgagttttgatccccagtaacctggtaaaaaccaggtacaggctcccgtacaagcttcgtactagaaaggcagagataggtgagtccttagagcttaggttcaatgaaagaccctgtcacaaaaataaggtagaatgagactaagaaagacacctgacgttgactcctgccctatacactataccacacaccacacccacacctacccatcccccccccaacacttcttctagccacatagtcaatagataggcttatacttgctataccagatagtctagtggtaatgatattctaacatttgttttatacaggaccaagtcctacaccgtcactgcattgtgtgggtctggtctctagtcttccagccacactgaagtgctccaacatgtttagggttcaaccataaggtactggttccatgcctaggcaagtctttcaagaagtatcatcacatgcatcccttcatcccttaaagaaccacaatggcaacagatattaagaagtgacactttgaagcccatgtgtatattgtccaatcaatttccctcagagccttttaccacaaacccataggtatatattcccctgcctggtaagccagagaacatctgccaagcttgccacccacatatgcatcccctcagcaaaagctgggtactagacacggagctaggattgagtcataaaggtaatcacaatgcaagtagttctccctttagggggaaagtcaagtattgagtaaatcgttcatgtaagaggagtgacctgctgtgtggacccacctacctaaaattttccaaccccatctctacaggaactctcactttccaaaacattacactctggagaacatgtaagattgttcttaggggcccaccatgcatggccaactcaagtcaggatgattgagtcagttcaaagcaaagtcccgtggccagtaggaggaacctttcaagattacaaggtactaaaacttgatgcacaaacctgggccccagctggcccacctggaatgccaatccatgcaaatctgatggggttttacaaaacagtccaagaactttgaacgtgcccatggttccagctgcagcttaggaatttgctgagttggtgttcccacatatccatcccctacccagctatggtggcacttcctgctggaaactgaaacacaccgctctaagtttagactccaggacagaaattacatccagtccttccagctcaggttattaagggggaaaaaaaccccgcttaattcctaaacttatcttggcaccacagttgcagccaatttttagacgtttagcaagaaaaagaagaaaacctattaataattttccaaggtaggatctgatggacagcaacaaataactctgagtctgttaattaaaatggagttgataagaatctttttctcccctccatctctttttatgtaggacagtcagccctgaactcaagtcttatgcgctgggagttctttttctgctccttcgtttgttgggtacgtattgtctctttagtccctccataatgagttggatgtgtattaccaggtgagtggggatctgggaaactgtccccacttctgagtttgcctcttttcctttcctatcatgtttatttattagtgtcctactttcatttcccattgcaatgataaaacactctgacccaagcaacttgaagggaggatggccttattttgctcacaattccagagtacagtctgttattcccagaagtcaaggcagcacaaacttgaagcagctggacacatctaccttggagggtagagagagaaggaggtcatacatgcctatttcacccactttcccatttatctactgccaaggactcaaaccccatgaaatagtgccactcccaacaagtgggtcttcccacttcaaacagcatcaagttccccacagacatgcacgtaggccaacttgaaccacacagccccgtactgagactcctttctagtgattctaggtctgtcccattaacaaatttaaacttgccatcactttaaatgtaaaattgttatttcaagttcagacaccaccattctagagccctctgatgtcacaggagtcacatataccaactcgggttctcatgtctgcctaaatcttcattagctacagagacactgcagtggctccaaagggaaggaaaaatttactggtgcaatttggtcctagcttgctttctattgctgtaataaacaccatggccagaagcagcttggggaagaaaagggtttatttggcttacatggatcacagtctgtcactgagggaacctgaaggcaggagctgaagcagaggccatggaggaacactgtttgcaggcttgcctgctttgttttcttattcagtgcatggtcacattgcatgggtgtgacaccacctacctataatgggctaggtccacccacatcaatcactaaacaagaaaatgtcttacagacttgcctacagggcaacctgatagagactttattttccaatcaaggctccctctttgcagatgacactagcttgtttcaagttgacaagaaactttccattaagaacaccctgggcagcctgagatatgttttctttctgggctacccactgggagtaagaggcacaatattcattacagctattcaattattttttatttttcttggattatcttattttattacctttattacttattatttatgttgtttttattattcacccaattattcaaatgcatctatttactgtgggtttccaacaggtggaccaaccccttttggcccaaggagaagagtgttacgctcttctccttgtgccaaagctgagataaaaatgacttgagtgactttacctggaaaaggagggtagagaaggagctaaccgtggcctgcaccccaatagtaaacataaagttctcactccaagtggatgtaaagacatggcactagaaatgtgaggtttgcaaaaaaaaaaaaaaaaaaaaaacattttttctcccatcagcacaacagcagggagttagttaaatcagtgatagtctgcaatcctggtaggagccttaccccattaaccttctggaaaggagaatatttgtagacttggaaaggacccaacatgtagaagggacaaagatggcttactctccattttcagatgattataaagtctatctacctatgaaaaaatattgggaggatgaccatcaaaatggttccagatagttttaattaataagactctatattttacacattgaaacctttgaatatctatacatatagattacttttataatgctgttaattcctattaattaacagcattaattgataaatgcccgaagtaggaaaaaaacccactcttgaaaaggaaacacaccataattttctccctccctagtctgtgggaacaatcattcccccaccccaccccacccccatcatcatcctggttccctgtggagcaggtctcctcttggcccctctgtttgtgttgatgcacagaggcatctttgtctttttttctgcttcatgggaaggagaaagacatagatgtggagatgccctagatgaaaaacattaagccatcttcaaattacaacctgttggtgtttctgggaagctatgatagcttgaaaacttctactgccatagacataatgatacagattgttggttttttttttttcttttatcatgggaagtgtagacagatgtattatcacgtcccctgccttcagtggtcaagcaagtggagagttagatagacatgaaataccaacaacttaaagagcttcctgttggaaaatggtggacccattcctcaggtagttgtccagcaaaacgacatttgccaagcacctccagtgttctgagctcccagaccataccaacgaaggttcccccatatcagggctcaaaagggagtggatgtttaccctcatctttatagttactatagaggtctctacatctctaatacatattaaggactctaggcagatcctataacatcaggacaagggaaatgccttggtcagtatagcacttgcctcacatgaatgaggagctgtgttcagatatcctgagcccacgtaagaagataggttcaatttgcatgccagtaattccaagaatggtagcccaggaggtaaagatatgtgtatccatggtaccaccagactagctcctagccaagtggttctcaacttatgggctgtgaccccctttggagtcaaatgatactttcacagatgtggtgtatcagctctcctgcatatcagatatctacattaagattcatttaaaataacaagattacacttatggagtagcaacaaaaataatcttatggttggggggcatcataacacaaggaactatagttaaaagctgtggcattaggaaggttgaacactactgacctagtcagtgtggaaaggtttcaggccaatcaaacatctcgaacaaatcagaatatctcaaacaaaatttggaaggtgcctgaggtccagcacccaaggataggtagaatgatggacatgaaataccaacaagttagaaagccttcttctggaaagaggtggaaccattctgcaggtaattatacaacaagctggcatttcctgggcacctccggtgttctgagaccccaggccatagcaagatgctatgcaaaaagaatgtccttcataataatctcaagggcagaacattgtaaaagaataagttatttctgaacgttataggataattggagataaaaccaaaacttaggtatcataaggtgatccctcaccactctgaagttgatccagagtttgtctgtctgcttcaggaaaagcaggtaccatcaggaatggggatttttccatttctgtgcctataagccagagcaagagataactttctcatcatggctcattacatgcatacatatgcatagatatagctgaaacaaaaacttcatggaaaaatacctttaatatgtgtaacacattctgatatcttctattctgctccaagctttctggaaagttggtcatgacccagcatattgattctattgcccattatgggtcacaaatcagtttggaaaaccttgtgctgagaggatatgacactatctcatcttttaattaaaagcggcttagctgagaagtcttggcatctggcctaattccatctcctccagcacccagtaagattaacagtcattatttttaatgcaaggccaatgaataaatcagataccatgacactgccaaccctcatggtgccccatgtggataatgggaatacaatggggacactgaaattgagtgtgacatgatctgtgatggagcctgcagtggtgtaacagtgacttggggaagggccacctaagattgccttgagattccagcatgatgtcctgagcagagagtaagtaagtgttatgaagatgtacaggaagaagaaagagtgatgtagacaagagaacttacaagtataaggctttcaggctgcagagatcccattgaggcaagtggggtgagacagcggcagccacactgggctggtaaaggtggtgagctaggaacttgatgaggaaggtgtcctgtcccatgggtatctttgacctttatctttaaggcaagtagaagctgctattaggtaccaaaagaaggacaagatccactgtgtatttcagaaagggatgctgtctagggaccaaatgaggtacagtcaattagaattaagagagggttttgcattgagatggtggagctgaaaattaatgaagaagggccttcatggcttggtctctgaattgaagttcagttggctctctacctctgcaagtttcaaaaagacgaattaaaacaaaaacatcttatttttcattttcattaaaagaataaaaactagagtgtctgtactgaaaatgttcacaccagcttttcatgtcactgcctctttttttttttattacgtattttcctcaattacatttccaatgctatcccaaaaagtcccccataccttccccccccccactcccctacccacccattcccacttttggccctggcgttcccctgtactggggcatataaagtttgcgtgtccaatgggcctctctttcccttgatggccgactaggccatctaaaaaaagcagtagtagtatgagctacttggtatagtatttactttgtattgtgcatctcagataatccaggcatagtttgaagtatgcaggagtatgggttgagataagcagatgagctcaggggcaggaggggagaagtatgggccatggctgggctgttctagagtaacaaaagaattgttctgtgtctgcatcctatgtggcttttgagctactggaaacatagcttgtatgcactgtctatttaacttgtattggttttcatttaagtagcaacatgtgggccagtggctgtcatactcggcaggaatgtataagggccagatgttgatacatcggggcagaaagaaataggtgagcatggaagaccacactagggtaagggtggggtagagaaaaatgccagagtccagaaattaaggtagcattggtttcctgtgttactttagaaactgagaagaactagcagatagagcaggaatctcagtggtgctggccactgtggactgagaacttccctaacaaccctacggcagaagtaagtttgcagttggtggtatcagtgggagctgaggggcaaggaaagcagagcaaagaaattgaggatgacgggtcaaggaagtggctcgattgttagactgcttaccgagcatgcttgaagctttgatgcccagtaacatataagagcaggcacgatggtgtagtttcagaaagaagacggtaggaggatcagaaattcaaggtcatccacttatgaagcctgggctatatgagagcatctttaaaaaagaaaacacggctagcagccagagtgaagctaacctgattggtgggagtgcccgtgctgggtaaagaaagtggcaaagagataattagaattagaagaacctgatggggcatgactgcgggcaccagctgtatgtaggaaacagtgagagatgacttgggagctttgcccatagctgttgtatctgattttaagatctgagaggtgctgagatttgacaaaccctgaggcatggctgaccagagagaaacagggagaaccgcctcagcgttgagagcaagttgtttaaaggccagagtgtggtaacacatgtccagttcatgtcatccaggacactaacagaagtggaacagggaaggaggcctcagagttggaggagggtcagtcaccgaagaaggaactggttgctccctcagcagaattcctgacacgatggagccacagattggagatgtccattaagccacctccccatctctgtagccagccaagtagatttgagcaaagaacaaacagacccagatgaagttgagatttaaatttgagttctgtgattctgggaagccctgaatggaccaacagaacagagggtctccaaggtactgagcaaaacaggctggactctatcacgaagtctctgcccacaaactaccatgcttagtctgacagcgaaactgctaagcaaacagcactggacagcccttcctattcatcagtctgtgtctgcagggtcatccctgggcatcctgtccttgggggtttaggtcttgtcttttgaatcacaaatgactctgggaagatatgtgttagaaacctgaggcagatctttatgggttggtggagcgccagctctgagcatcgtctggaatagagcacagtatacaggcaagtaaaaacccctcagctcatggcttattagaaaacataagcatagtgcactcaaggaccccatgtgggcaggagcaggatttaatgtagggaagctgggaggacttccccactcactgtgttctgtttcatccacaaagagttgttaggtaccagctgcacaccaggctccagaggctcctcctgctgtctgcgtgtgcagacgccacatctcttacccggcctaaggtgatattacactgaccaccgaccccctctgcagccaggtatacctcggtgtgagctcttctcagccagtcctgtccgggtggcctttggcaggctatgtaagctctggaaactttcagactttataacaaagggctcaggaatgaagagaggcggcagtagctcctgacttctcaaaattgagaaaagtgactggcaggtgtccctggaaagcacctgctgatgtcaacagtcccagtttctttcttggcatggcggaaggagagaaatgcgtcaatcttttcaggagaatacagctttcgacattcccctctagctggagccggctgtaacagtaattgctacaggttgaatagagagtccagggtaaattcaagtcttggcaggtaagctgaagagtaaccattatctttctaaatgtaaatgacacagtcattttcagcctcccttttgtcctgtaaaggaatgtggatttatttttcttacaaaagcctttcaatttaccttttaagttaagtccaaagaatatgaatagggtttgccttttcaaacatgggagtgaaggaaaaagctaagatacagccctgagggttaatctctggtaatagattttaggaaaacagagactgtctccttaagcagcatagcattttttttgctcacacagtgtatgtgtgtgcttgtttacagatatatatattacatatagatacctaagtatatatgtatatatgtacatgtacatatgtgtgtgcatgcatgtgagctacagtataaagaagatttaatcattttaatatttttggagatagcaagcagtagtgagcttgccacatagcctgccagcacatgacttagctctattgagacatgtttcacacacaaggttttgcccaggaaatacaaaggcaagggagactcttttccaggctctgaggaagagaggaatctccagaacacattttctaacaaaatatcccaccagcatcagcctgcctcctcattccttcctggacaagagtctagcagagcaaaggtgctcaaacaaaaagagacactggtggatacctggttccccatctagaggcacacaattgtcctccaaaataggctagctcttcagaggttacccgccaagtcttgacttgagaggttctctgaaatatatttattcctttggagatgttcattagccaaagagatttaggccaaaaccctaaaaagtggggtcagaacctggtttggtgagcgctctctaaccatactctctcaataaataaataaaaatagctctacaataaagcatgatctggggtctggggagatggcttagtccttttaccacctgaggacctgagttttgatccccagctcctgtgtaaaaggcagacttgctggcacttgagaggcagagacaggctgatctctgggtcttactggcatgccccccaatcgcaactttcaggtacagtgagaaactctgtgtcaaaaggaataaataaaatggcgaaaggttgagaaagccactcaatgttgacccctgtccttcatgtccacttgcacttagtcacaggcaataatacgcacacatggagaaagcctacacacatatatacccattttataacgaggctgagattcagtgaggttgtggaacttgaccgaactcccacagttcccaagtggtagagttgcaagagagggttcctccttccacatatgagttccttgattgaagagaaaggtgacaaggacaacagatgactaagtgtctcttcctgtgacaagtgtctgccagtgctaccgagaggcacagtgccagataccggagggagaagctggtgtgcaaatcaggctcccagtttctccaagcctggaggaagtacccagggagctggggggatctgcaactctataggtggaacaacaatatgaactaaccagtacccccccacacacacacagagctcatgtttctagctgcatatgtatcagaagatggcctagtaggccatcagtggaaagagaggcccattggtcgtgcagaccttatatacctcagtacaggggaataccagggccaagaggtgggagagggtaggtggggtagtgggtgtgggaaggtgtgggggacttttgggatagcattggaaatgtaaatgaaataaatacctaataataaaagaaaaaataaatttaaaaaggcctccatttaaaaaaaaaaaagcgcagaggaggaagagcgctagagctagcaaagatctgagctccttcccgggtgtttctctctcttcatgcttcaaaacagagcttcctcaagctcagtgggaggtcaataaactgttctctgtaaccctggaaatcccagacaagaagtccaaaaatcctcttcaattaacaaactttgaattagaagaaaagtagatgatgaggtttaagagaggttatgagttatgaagggagtcataatggattgagctgcatcccctggagatgtggggtggttagctggtcagttactactagtatagaaatctcccatggtctctgggtaagtcagcgtcttgtattgacagcttgtttttgagtttttgttggtgtttttctatgtagtttaatggattcgtaaatctatccagatgaatggctggtgtgaaaattttgtcagaagtctaggaatctgaccagtgactgctcaggagagttccagagtagtaaagacttcctgacaaaaggatgcccttcagatctgcatctctgtagatatgaatttaaagtctgatggtagcttagcatccacctttgggagagatgtgcaagtcaataaaactgaagagtttaatttgacaaaaaggaaggctgatgttttatgaagaaatagaaagggagtctcatgaaggttattttttggatactaagcctagcgtttagtctaaaatctcaccttaagtcctggtataagataatcctgttagcagaagttctggccatgtgaataggtcaggcctcttgctaaaacatagaggtggtgtcagtcccatcttatatgggggcactgagagagggagtgagctgccctggcattttcagctccttaaattaaaaagcaaaaaaacaaaacaaaaacaacaacaaactgtcatctctataaccaatgttctcaaagatctggagtaaagcatgaaaaactttgatggacacttagctttctaagtacttgaaggttttctctagttctgtcaggaacatcattgtctactaggggaacctaaagataagataaaaccgacacttttagacaacagagcacgcgtgccttacttaaagacaactgaatattaatatataatacataaatgaactttctcattcagatgatcatgaaggagttagttacataatgagtttgagcttgaacaaatactaactgatggctcatttatactccagatgtcctgggatgtgataaagttatattctgatctgccaaacttgccatcgtgtccaggaacccatgcgtcatggagtaaggaacacctaactctttgttcctccctgtggatgaatttttcaacaggatgtccttagagcagggtgcccatctataccgatgcttcactgctacatgaatagtagctagggcagaggctaatgacctcaagattggtcacaataggtagaaagagcatttggcatctaatcacaaaataaaaccacaagaagcagaaaaggtgagtggatttatgctgccccattgtgcccgagaataggtcaaatcagtgccatttagccacagatccatccacatgtgcatcagttgccatggaaatccctccatattggagtggggagagcatgttccaactcagcctggggtgggaggttgggaagtgggggagacaaaagctcctgagcagtctctgtgccactgggatcgaggcaggtatttttccactttgcaggagcaaagtctgcaccaggagcagagaacagcttgtaggggattctgagcttacaatgtttattaaatcaagctgcttgaggagtttaatgaggattccaataaaatccaccttgcgggggtttctctggggtaacaagcaacagacttaggagaaggaccaagacaccaagacctaggagccagtgctcaaccagctgctcaataccaagactagaacgagacccagcgatctatccaggcatgtcttaaaatagggaagtgctgaaacctcctccatccactgctttctggtccctagcttttcacccctcctcagcacggtactgtagtattatctaaatgtctgaaagacttgtgcttctaacccctgtggatggactttgcagatctctgaacccctaaaatgtgtgcttggcatggagaatccatctgtttttctggacaaaggatcaaattctcagaaatgccttcagtggaaggtgaagtttgatccaggatggagcctggaaggaacgctccaggaagctggtaggctagtcctagagtctcaggattgtcccctctaattgccgccatcatgcctcacaattggggtctgtcactgaaggtatcggtaccagattctagcctcagggaatgctaggattcataaacaatgaatttttattaataaattattcattttccccccataaagctccttaaaacaagaccagaaccatctgggattttttttttcagtgctgaggatcaaacctaaggcttctagttcattttcaaaattcaaatgacggtggctggaacgctgtctaagttggttaaggtgctagccacgcaagcaggatctgattctgacattaaaacaaataagtaaacaaacacagcattgcagtcccagtgctggagaagcagcaggaacaggtgagtctctggagggccctgggcagcccacacaactaaattggcaagttccaagacagtcagaatctatgtctccatttaaaaaaaaagtggatagttccagtcatacaacactgatgactgacctctggtttccacatgcacacataaacatgcacagaaaatgctgatgactgaggccagggtggtggctagcaccaaagtgcctgtaatccacctacactagatgctgaaaagagagattcacatgagcccatgaatttaagaccagactacacaacataatacctattttttaaaacagagaaaaacataatagctgagctgtatctcaaacactgggatgtttttggccattggttgttagtctaaggagtgtcaaatagcccttgatcaacgggatgagagcaggcaaataaaccgtcagattgccatacacttgagttaagagtggggaccattttcatctcgcctcatgtttctgataacaactgtgggtatctggtgccagccccgcatggaaagaatgcacaccagtctaagagctggacaaatagtaaccacgagaatgtttgtcgcatttctcatttcaaactataaatgtccgtttttgcgctcacacagtataacccattcccattctacttctggtcccaggtccctccagttggcagctcacaccgcccctgcaaacccctgcaaaagggctatgagcagagccactcgcctctttggcattccctctaggaggccaactaatactaatatgccttcaggaatgactttatcccttctcagaataatgacatctgtcaattatcttgtgtttacagttaccaggtaaatgcacagcatcctaaatacttttcacatattaacttaggcagcatcaggcacagagggttcaatgattttgtctggataatgaaggcagagatgggatttgtgttcctgtggtttgaaccactgcactatggagccacgtgacccagcgtagtctcaaagcagtccgtaaacagctggacagccagggacagaaatgcctttctctgcagtgaattctctcccagagccagagtttgaaatgatctcttccctctgacaggtttcatccccccacctctcatcttcggggccggcattgactccacctgtctgttctggagcaccttctgcggggaacaaggcgcctgtgtcctctacgacaatgtggtctacagatacctgtacgtcagcatcgccattgcgctcaagtcctttgccttcatcctctacaccaccacgtggcagtgcctgcggaaaaactataaacgctacatcaaaaaccacgagggcgggctgagcaccagtgagttctttgcctctactctgaccctagacaatctggggagggaccctgtgcccgcacaccagacacataggacaaaatttatctataacctggaagaccatgagtggtgtgaaaacatggaatctgttttatagtgactacaggagggctgaactctgtatttgtgaacaaagagtcattttcttaaaaaaaaaaaaaaaagaaagaaagaaagaaggaaagaaagaaaaggaaagaaagaaaagaggttttgaaaacagagatgcacactctctcacacacacacatacacacatacatacacataagacctttgtcctttttctaaaactcagagccagtcaggattcagaataaagagagaaggggatggccctggaggacatacacactgctgggctcagaatctgcttggaaggcacctcatggttttcacgatgccgacagctacaagcaagaggcactgccaaattcagggaacacttgtggccagcttggaggatggacatctctggatatgcatacacatacaaaacttaaaaggcattaaaaaaatgagtctactaaaatcacaagttcaagttgaaaaacattaccagattaagcactagagacaccctctccctccagtggggtgggggggggatacaggttggagggatgggaaccccactcctctttccaacttttgcaatatgggtcactgtgtagaccactcactcagtctatgtgtggttcaagcccccagagttctcaaagagatgctgacgggttatccggactggagtctgtggttggcacctctcaccagctccatttccatgttcaagactgagggcccaaaggaggggnnnnnnnnnnnnnnnnnnnntttttattcttttaatgaaaatgaaaaataagatgtttttgttttaattcgtctttttgaaacttgcagaggtagagagccaactgaacttcaattcagagaccaagccatgaaggcccttcttcattaattttcagctccaccatctcaatgcaaaaccctctcttaattctaattgactgtacctcatttggtccctagacagcatccctttctgaaatacacagtggatcttgtccttcttttggtacctaatagcagcttctacttgccttaaagataaaggtcaaagatacccatgggacaggacaccttcctcatcaagttcctagctcaccacctttaccagcccagtgtggctgccgctgtctcaccccacttgcttcaatgggatgcctcctaaacacctcctccctaccagccccacagtgtgacctcaggaagctgtgggcctcacctggctatgactgacccgctcagagccggtgagcgccaatatagcccatgtcatttgcttacatttgccaaacattttgccattttttttccaaaaacaacaacaaaaaatataaagcgtacgaatttccaactgttgtatgtataatcctctaatactatttttaactgcttctagaatctgtgttaacccttcagtcactaacaaagcttttacttctctcctttttttaatgcaccaaaaatataaagggattcgagggatgcagttaatctattgtaattttcattcttactctgataccatgaaaacaaacaaacaaacaaaatcaaaaacacaatgtggtataagaaaaagatactccggaaagagtgtaaatgcatcttgaaaataatcacatctgagataatgggataatgtgacaagctgcaaatctgccttctggctttatcccctgtgatgatgttactgtcacaagaagcccttttatagtcatgcttcaggtccaatgggcattcctcttagcctgtgaaggagactcactcaaatgtgggttgatgtggatgggagccgtgctcctggggataggagagagagggtgtgtggctcctgcctacgactgttttgtgagctgtgatacttgtgatcataaacccacaagctcctaagtgatcactgtccagtccatgaaaatgttagtgacaggtcccaggtcagtcctgaactctgtgcattgaaagtggctgaacctcagagcatcaccttgccatttgggataagaatcgtatgggtgttggggggagggaagatctcttgcaccagcacacttaagacaatgtggcctctctcatcaggggatggatcagatgggagcatatatatccatagcaaagggtccagtcagctcacccttcatacctctttattgaccttttttgtagacatacatacggtaccaaagtcgaccacaaaggatgcttggtttcatttttccaccttaaacatccactcacctgaagcaatgaaagaataaggccagaagagtaaagacatggatgttgtgccatattttctttttacagatagtataagtggggaagactaggtaatagcctcaaagtagagaagacatcaagcaaaggcaactgagaaaatgtctgtgtggcattgtggctatggttgaccatctcattcagggtgcttctaaaacagccctcccatctgtctaccaggagttagcctatccttgttgatgaacatagggtgctcatcagtatagtaactaggaatggggaacagttctccaaacagtttgtaaggtgatgttctgtcgctctgaaggctttgatcatgctccaaacaggttttggttcagtcttgttttgaaaatgaatgactaatgggtgaccgccctctctgtcgtgtgtctttgcaaacggaggccctgggatgtactctgtttcatgacatgatttgatttgatttttggaaaaaaaaataatgatttttaagctctttgtatcttggatttttttccccttaaaatgttcttaaagatagcaatggaacccaactccagggcttgctttttatcaacagttatttataaatttaaaatctccctgtggcaaaatgatttccatgagtgttgtgctctctttcaatttttcaatttttctcatgaatgtcaaaaaagaaaatccaatctacttttcactgtgcatccaaggttagatccagccccttggttgtctgcttggttttgagtggtattctagatgaaaactgtcctggtaagatctcccttgaacatacagaaaacaaaccggggatggatggagaagacgtatgaaaggaatgctggagtgctctcttctgcagtcacctcctccactatcttggttgaatacacccaaggatggatgtaaaggtctctgctgcaaccttaggcagacctttgtaacttatacatgtaggccaagcaggtttgatgctttgtacctgtgctacttcccacattgtggcaaatgggtttttcttccttctgctgaggttctgtgctgtcagggaacacatgtgcctctgttactcacttcccacccccacaaggggagccaccaagctctgataccctggggggtaataacaaagccatgggatgcccagactttcctcacagctaagaaagagcaaaagaatccatccttttcttttcccctaaggagcctgctgctagtgcttagcagcaaaataataaaggcagccaagagttcctgaggagctatttgagagttagcatcttccaagcaggagggagggtgtgcttcttgctaacaatcctttctttttctctacttcacagtgggttagctgctctggggatgatgacctttcaaggagaggtgttgtggtatctgtccatttggatccccagatccagaaatgccctggagtttctcctcacactatagaaaggcttgtaggcctgaggcagcctacaagaatgtcctacacaaggacacccacccagtgacctactgtcactagaaagtagtcatgctgcccctggggaattttcctaagattctggggtgattttactagttggtcctctccagtagcttccagtggagacatttcaaaggaacccagaaagtgtaagtatggatttgggctcacagaagaatgctctgaggagacatggtggttgctcagccataagtctgcccatctggctttcttttaatgtgctgtttctggtcctggggaagagtggtttccgtatcaactagggcttgtcaaccatgggatgtgtcataagatctccatgagagtcttgaaaacagtattcattattacgaaataataaatatccatctttttctattcagtatgtggaaatcaactgtctgacctcacagtcaaaaaaaaaagaaaggaaaaaggacactggcagaacaagctgcccttgctgtttattggaaccctgccatctttttgctgtgtgtttggtttggttatggtgagcaaggagacccaagtgtgcagcttctcactctagcagatggaagatatttatttcctgacttttgctgttcttacctgattgttttgatgcatgggacagccagctatctggccagaaatcagggacagcaccaaccagtagggttttcactggtcccctgggtttccttcaatacaattaactttaaaatctttaagttaagaatccaggttgaatacctaaacggcaccatgttttccaagagagggtaatagtgaaataaaatctggtttagggaattcctttgaggtccaaacccagctcttttcctcctgccttctaatttgctgcattcacccaattcatacccaattctatccttccaaacaaaaacctagtttcatagtcaactgaccgaaaatgacaggcagtggatccctggtcctctagagtattactgctactcaagggccagttagaagacattctcattggcaagacaaacaagaaggttattggtattgttcacaagcctttgctaagatcacttctttgtgttatacctggattgcatcactccacactgcctcctttgctcttcacgaatgtgaagaacctcagctactgccaagtcatggtgggaccaacatggcttagcatacttccacaaaaaaagaaagaaaaagatggtgctgtaactcaggggtgtttgcctgcctcaaaaatgaagacaagggttcctacttttaagaggccacctctgatagcataatttttcattgtagtgtttcttttcctcaaggatgtggtgtttgaccataacccagtcatccttgtatctaaaatgttgggctgtgtgtcatctagactaggtacatggcccctttccttcaagagctcacagatcagtgaactggaacacaacaaatcgtccgaagaacattcctagccaggttctgtctggatgtgagagatgattcagagctgactcacagtgatagcaagctttgatcgatagctgtaataatcaaagagagagaagaagaaggcagggttctcaataccaaatgacagtgagtgtgtcccaattgggtagtaagaagacaaaggaaaaagtcactactaccacacagatagaaccaccaaagcagagcaacacattactcttgtttgggattacctagtaaaatacttgaagccttgtaggccatcagactgtcaaaactacttaccctgatggtcttacccaaggtcagctcaaagcaataaatgagcaaatgcctggcctgggtaccaacaaagctttatttacaaagacagtcagtagctgaagggccagacagggtgtgctgaggcaacaccgtcttagagatgccaacagttcagcacaggtagggcagatctagcacctacatcttggccatgacattgactgagtcatttctccaaagggccctggaatagctgtctatcaaccctactgtccctaaaccaagaagtctagttaaaatatctcacttgtttccaagaaggggaaagtgcttttctggtgtcagagttggtagtttaaggcaacgttacttttccctttggtgcaataaaaattttgaactacagaacctgtcttcccttccagtctgacatttggcatttcaactagactaatcaagcccccgccccccaactaaagaatggatacagaaccatgaaggagaagcataggaaacaggaaaagaggaaggaatccagatactgactagagcttcaaacctttccctcttcagcaccaacataagacattggcattctagagctaatcaatcaggtagaataattggtcagcactagtaatagctaataataacagtcactaacatttatcaggtgcttactttgaaactagctgctgggctgagctgattacctgcattaacacattgactcttaacactaaccctgtgaggcaggaactattgctagttgtattttacagaggaggaaaatgaaacttggaagcattcggaattggctcaaggtcatgagaagagatgagattcaaacccaagcctgagtccaaagtgcctgttagcaaccataattagatgctccctccccacccagcaaaataggagggagccttctctgcctccagggaatgcctaacctcaaaatctctagcacaaatgatccagaggccacacattctttgtgtgtcccccgggatggtaagcaggacacaatggcagctgtaatctagacacagtattggctatccctcctttagccatgttctttatccctgatctcagtagttcatttatacaaagtgtcccaccgaagataggcaggtaaaaggaaacagaatgaaatgtatcaggagtcctagagactgttctcagtaccagacaggagctcacatcccctatctcctatgaggtatcataacacccatctcatatatctctgatccaggggcttcaaacttgctaaatattgactatgtctttcgttccagatcgcaggctttgaggagctgagtatctagacatttacatttttataataacaactcaagtcgacaatcaggggttgataataatcatacattttgaatatttttccataaggttgaagtgattattatttttgctatgagcaaatggaataatgtagccaattttctggagatatgacattctgtaggctggaatttttgctgtttccttactggttttcttaagttcatgctaatcaaatggaaggtggctcttgtggagataaatttggcctgaaagtttgatttacaatctgaggccataaaatgaagcagaactgggcaattcagggagctcactgtaaggagaacagaactaaaacagcttgagctgaatccagcagctcaaagggacaagggcttgggagttcttgtttattaagcctgcaagctttatgccaggtctgagaatgcaatatcccagttgaccccaccagcccttttattcattccctgacaggtaagttatcctcccaccccctttatagatcagacaagaagagcctagaaagttcatttcccaaggtcactagctagtaaagtcatcaaaagtcagtatgaggtctccataattcctaaattggagctctttccagcccagcacacaacctcctgagtgggaacatggaagccaacagaacatccatatgtggtatggaagagatgggagtgtcccactcctactgagagtcaatagtttctcagagaaatgagtcaaagctacaagacctctgcaaaatgttgcctgccaacataagacccataaaattcgaaaagctgttccactctagcagttaccagtagagacctttcaaggccttcctccttccatcttagacatatcaaatccttcccagccagttgaactgagcaagaagcaacttcagctctcatttctgccctgtcccctagagtggtgctaacccatatgcaaatttccttcatcccatccctctggcatctctgtggagagatggcattctgacatgtttctttgtttgtttgtttgtttgttttgttttttaaatcatctggggaattcttctctgatgacttctcccaagactctaagaacataagacttccaaaaagtcaaatacaggacatgggtttcttcctctctagcttctaaatgccaaggaaattctcttgccttttaaactgccaggtcaaagtcaaaagaggacagatcaataaccaggaattattgtggtctccccaaacctgttgctcaacaagaattagctttgcatggcgtatcatgtggatgagttaaaacgtttaggctttttatataaaaccacagcgtcatttatagaggtgtgacctgggctcagacctggttccagccaagatattgtttgacttaccatgcagtgactgtctgtggatgaatggacagtaaactggtcctgaatgcaaaaggagaaagcatggcaatgattcaagtggttttccctggcacgcagcctcctctttgataaagacatagtgacacttggacacaagatctattactggggacttgtgtaaaagatagataaataaaggtttggggtacaacctttggggtataacttatcccccaaatgagtattaatatgataccgataaactagctccaaaagagcctggcttcatagaggtccgtgggcttagaatctgttctttcgagggtgagatggagaagaagctaacactttactgctgtgacttctgctcatccctttggctggaaatccatgcggctgtgatgtaagtctaatagagagtaggaaatgcagaaaagacccatctcttttctccttttggctcttcttccctccttcccctctaggcacagagtatcaagacattgagacagagaaaacctgccctgagtcacagtcaccttcagaagactcctttgtgcgaagctgagggctgctctcttaacagcagagcccaccaccatcaccaccaccaccaccactaccatcaccaccattcacagacctcgaggcctgacagccctgtgctgcctgggatcctaagggttcctatgtggattaacctatcgatatgtggtcctttgaggcttcagacacaggcctgtgacgaggactaaggaggtggcacgtggtcagctgccctccagagtgggcttcggtcctaaaatgcaaggttgaaactgacgtgcaaatttcctttcggcctatccctcttctcacttctgtggggatggctttctgacatgctttagaaaaccccctctggggatgcttctctgaccaaacactcttaaccgttccaaagaaatcagcggaggctgagctttaacagaagggtgtaaaaatccggattcccagcagagaagagggagaaaagcacagacttaatagattctgcgtgtggtagtctgtatttttgcagcttctattttccagatgagcagtttagagatacatgatataaagtatatactgtacatttgctgaaattatattaaaagcactattttaattctttccctgtctcatgttgtcatctctgttacgcctcctgtgtctctgagtggaacgagccgaaccggagtgtgccttctagctgtgtgtattctgtgtgtatttatgggctttgacatgattaaaagagcacaggctctggagtcaaaccagacccaaacccaatcttcctcgaagcgctggctactgatacgatgctggtcgagtgatctggcatgacagagcctcggtgtcatctgcaaagtgggaacaatcgtggctgctttaaaacaactgccttgagacttcactggaagtgcatgtgaaggcgacaaattcagtgttctgcataaaaactgtcattgttgcttctacaacccaaagctgtacctgatacagctgctgtgaatgtctcagtagtcctccatacccaatctcctttctgagtctcccaccatatagacctgggaaaggaagagactatcttcagctcaacacaccagcattgttcaatacagtccgtgatggtcaatggatgcttagtatataaacaagtcttgagtagctagccctgggccccgtggcctgcagggatctgacttaattctctttcatctaccacaatcccagcactcacttccctttctctgcatccacatatcttaccatgggcagagctgcagctgccttcttctatcctaccaagcctcttcccaataaactggcttcatttccatatccttaccacttcactggctggactccaacctccatgggcaggttgggcaggtcaatcttgccactagcctgca

SEQ ID NO: 1037 - DNA, 1537 bp, Mus musculus
gaatcctgttcacgatgttggtatttggaccagcctgtggatttattctgggctctttctgtaccaagatctatgtggatgcggtcttcattgacacaagtaacctggacatcactccagatgacccgcgttggatcggagcctggtggggcggctttctgctctgcggtgccttgctcttcttctcgtccctcctgatgtttgggttcccacaatccctgcccccacactcagaccctggcatggagagtgagcaggccatgctcccagaaagagaatatgagaggcccaagcccagcaatggggtcctgagacaccctctggagccagacagcagtgcctcctgtttccagcaactgagagtgatccccaaggtcaccaagcacctgctctcaaaccctgtgttcacctgcatcgtcctggctgcttgcatggagattgctgtggtggctggcttcgctgccttcctcggcaagtacctggaacagcagtttaacctcaccacttcctctgccaaccagctgctcgggatgacggcgatcccctgtgcctgcctgggcatctttctgggtggccttttggtgaagaagctgagcctgtctgccctgggggccattcgaatggccatgctggtcaacctggtgtccacagcctgctacgtctccttcctcttcctgggctgtgacacaggccctgtggctggggtcactgttcgctacggaaacaactcagcacgtggctcggcccttgacccttactctccgtgcaacaacaactgtgaatgccagacggactccttcacgccagtgtgcggggccgatggcatcacctacctgtcagcctgcttcgccggatgcaacagcacgaacctcacaggctgtgcgtgcctcaccactgtcccccctgagaatgccagcgtggttccaggaaaatgtcccagtcctgggtgccaagaggccttcctcaccttcctctgtgtgatgtgtgtgtgcagcttgatcggggccatggcccaaaccccttctgtcatcatcctcatcaggacagtcagccctgaactcaagtcttatgcgctgggagttctttttctgctccttcgtttgttgggtttcatccccccacctctcatcttcggggccggcattgactccacctgtctgttctggagcaccttctgcggggaacaaggcgcctgtgtcctctacgacaatgtggtctacagatacctgtacgtcagcatcgccattgcgctcaagtcctttgccttcatcctctacaccaccacgtggcagtgcctgcggaaaaactataaacgctacatcaaaaaccacgagggcgggctgagcaccagtgagttctttgcctctactctgaccctagacaatctggggagggaccctgtgcccgcacaccagacacataggacaaaatttatctataacctggaagaccatgagtggtgtgaaaacatggaatctgttttatagtgactacaggagggctgaactctgtatttgtgaacaaagagtcattttct

SEQ ID NO: 1038 - protein, 490 aa, Mus musculus
ILFTMLVFGPACGFILGSFCTKIYVDAVFIDTSNLDITPDDPRWIGAWWGGFLLCGALLFFSSLLMFGFPQSLPPHSDPGMESEQAMLPEREYERPKPSNGVLRHPLEPDSSASCFQQLRVIPKVTKHLLSNPVFTCIVLAACMEIAVVAGFAAFLGKYLEQQFNLTTSSANQLLGMTAIPCACLGIFLGGLLVKKLSLSALGAIRMAMLVNLVSTACYVSFLFLGCDTGPVAGVTVRYGNNSRSALDPYSPCNNNCECQTDSFTPVCGADGITYLSACFAGCNSTNLTGCACLTTVPPENASVVPGKCPSPGCQEAFLTFLCVMCVCSLIGAMAQTPSVIILIRTVSPELKSYALGVLFLLLRLLGFIPPPLIFGAGIDSTCLFWSTFCGEQGACVLYDNVVYRYLYVSIAIALKSFAFILYTTTWQCLRKNYKRYIKNHEGGLSTSEFFASTLTLDNLGRDPVPAHQTTKFIYNLEDHEWCENMESVL

SEQ ID NO: 1039 - DNA, 337344 bp, Homo sapiens
  misc_feature (1)...(337344): n = A,T,C or G
tctagcgagtctcctgttacatgttacggaatatttttcatagactcaatgtatctttataccatcccccagcgcatatgcacttactccctctccaacaaggatatagctgtccaaattgtttgtactctggatctgccagaatcttcctcttaaatgtttaactgaagaggaagctatggtgtctagctagcaatgtgtactgttacactatgacatgaatttctcttgcttccctgtttctttgtaaataaaaggtgaattcattactaaatactttgaaacattccatagtctttttgtggcctgaaacagtgcaggggaaactccgattccaagacacagagctctcaatgtatctggcagattgtatttttcaaaggtagccacagcaaatatatacctcattccttggttcttctaacaaagtgacatcaaacatccttcaccaggagatgaagtctatgttctcccgtcttgagtacagatggaactttgtagctgcttccatgaacaggctgcagcagaactaacatggctgacttctgaggctaggtcataaaagtcacagggctccctctctgaggcaggtacactgggagccgggagcctgcatgcattaagtctggctgccctgaggctgtcatgctggagagatcagggtgagagcccgcaaacagatacccaaagaggcccagctattctcacccgcagctgtttgtctttgtagaccaggtgccaggtgccaaatgagatgatcccagctgacagtagagtccagctctccctcctaagccctgtcctgactgcagatttcttgagcaaagtacgtattgttttaaaccactaagttctgtggtgggttgtcacccagcagtagataattttttaaaagtttcccatccttattcgcacttacattattttacatcccagggcatactctgcaaccacccatgcatttcacggaggcccactgcgcctttctgggagttgcaattgcacagatagattcagcaaggtgagaatgccatcctcaggcagccaggaggtgactgtcaggctatttggttggggaaccagccagcatcccctctgcagaaccttcctctctttttcctatggaggaagtaggaactcctcttccttggtcatcccatctgtcctgtgtgaggagtaatttccctgagaaactgaccatccatagtcaggatcctgggttttcagccttttatgtcctgtgagcctctggatttttgttgggtaaaggcagttaggagggggaaatccaggcaaccattatgatccagaagctcagtatctcagctttcattctgagattcagatatgccaccaaaacaacattcagacacaaaataannnnnnnnnnnnnnnnnnnnnnnnnnnnnnnnnnnnnnnnnnnnnnnnnnnnnnnnnnnnnnnnnnnnnnnnnnnnnnnnnnnnnnnnnnnnnnnnnnnnnnnnnnnnnnnnnnnnnnnnnnnnnnnnnnnnnnnnnnnnnnnnnnnnnnnnnnnnnnnnnnnnnnnnnnnnnnnnnnnnnnnnnnnnnnnnnnnnnnnnnnnnnnnnnnnnnnnnnnnnnnnnnnnnnnnnnnnnnnnnnnnnnnnnnnnnnnnnnnnnnnnnnnnnnnnnnnnnnnnnnnnnnnnnnnnnnnnnnnnnnnnnnnnnnnnnnnnnnnnnnnnnnnnnnnnnnnnnnnnnnnnnnnnnnnnnnnnnnnnnnnnnnnnnnnnnnnnnnnnnnnnnnnnnnnnnnnnnnnnnnnnnnnnnnnnnnnnnnnnnnnnnnnnnnnnnnnnnnnnnnnnnnnnnnnnnnnnnnnnnnnnnnnnnnnnnnnnnnnnnncctgtctctccctctctatcctcctccctccctccctccttccctctctccctcccttccatgtaataatgcctgtgctgctgcccagggaccacactttgagtagccaggctctaggcaatccctcttgctctcacctcctgcctggctaggtgcagtcttacagctactgtcactaccatgtccgttttcttctttcctcctaatgcttacgggctcttcttgccattttctcctgtcccatacctgttgggcagctccagtgatgaagggtttcttcttcttgtgtcctcacttgtttgttctctccctcatagttactgaccactctgggcttggctcttttaggaggcaaaaatatagaaatgaaagacactgaccaaaggctaatgagggagaagcacagtgagagctctccacagtgggatccatgctagggtgtgcagaggctggctcaggcggagaggggaagcaggtgggagggagtcaggaggcagttagtgagagggtattctctgaggacttcctggaggcggtgacactagctggatcttaagatactagtaggtgtaagccccctgaagaaagggggaaggaaggacattccaagcagaaggaacagcctgcacaagtgtttagaggaggagaccgcatggtgagctcaaggaactgtaattaagcacggatggagtgtacggtgtgtgaacggctgggggagggttacggttgtatattatctgctccggctgccataacaaaatactacagactgggaggcttaaagaacagaaatgtgttctctccccattctcaagactagaataccaagatcaaggtgttgacaggtttggtttcttttgaggcctctctcctttgcttgcagataattgccttccacctgtgtccttccatggtcatctctctatgtatatctgtgtcttgatctcttccaataaggatacagtcctattggattggagccatatgagcttgtttcaccttggttacctctttaaaggccctgtctccaaatacagtcacattctgaggtggtaggggttgagtttgaaacatacgaattttgggggagatacagttccgcccataacaggtcatcaaaggttggacagacttcttgttctgtttgttcactcctcactcctcaaccctcctacttgctgtagtatgggagaggcgtatgcctggaggaatggcaaggaggcagcgtaaggaagctagggtgcaggaaacaaatgtatcccgagcagaggttttgtatctttctcccatgggtatatgatgtctctataacccattctcttaatttaggttttctttctctgtagtggcagtctacaccctggagattttttttccatgacctccttgtatgttctccagaaactcttctttcactttgatcagtccaagggttaatggactgactgcaccatgcccacttgaggtacacaggcctggcacccactacccctcaggagggcagacagctgtgaccactttctgctgagcttggaactcacgatactcttgacatataatcactatccctcatgcttcctttgtggaaatgctgttgggccttcaactggtttccagtgctggctcatgtcatttgcctaccatagcataacccactctccaaatatcaaggtttgtgtgcatttttcagagaccaggagcaaaggtgggaaaaccctcctccgagagagaggacgaaagacattgtgtccaggaaaggggctcgtggggacaatttttgctgcaagaagggtgtgtgtgtagttgcacagaggatgcagaggaggtccctggggggaatgcctggaaggaacttttctataaacattgacgccttctgaacattgacaccttctggatctcttctgtcctaatcagaggtattaagcttcttggcacgaggcctggtggtcactgagaacaaatgatcctttatttttattattattgttattattattttgagacggactctcgctctgttgcccaggctggagtgcaatggcacgatctcggctcaccgcaacctctgcctcccaggctcaagcgattctcctgcctcagcctcctgagtagctgggattacaggtgctcaccaccatgcccggctaatttttgtattttttagtagagactggtttttcccatgttggccaggctggtcttgacctcctgacctcaggtgatccaactgccttgacctcccaaagtgctgggattacaggcatgagccactgcacctggccgatcctttatttttatagtaaaacactttctatacccttaagaagctaacagtctatgtggataaacaaattctatttatatgcatatcaacagaagcagcaaatgatgatctccccaaatgtactaatattgggaaatgtttattatctctattctttctcctttacctcaaaactcattttccataaatataacagattcctaaaaccctggttttctcatatcaattctttctatttccattaatggtcttctttctttcttctgtttctccagttgaattcaccattttttagaagtatatctacattgatgtttatcattttcacttctttgctgagctttagggcacattcaaattaagagatataattcacaatatgaaactatgaatatagtaagtagcaaacggaggctatttggtagaaaggcatatggaccaggctaattggaaaatgggggtggggagagaaaaactctgagaaaaagaaaataagcttcaactcagcccaaatattagtttcaagccaaataagttggcctagccccaattctatccttggttggacacaacataggattggtgcattttcagaaaaaaaaaaaaaaaattcacagggtgagaatctaagcatccattttccatcccagtgacaatcagaaatcattctttgcatttattcttcaactttgtatttgcctgtgaacaaaactgaagctggcaaaagatgcttcacgtgaattacttgaacaacaatttctcattgtgttgaattacactgaggctgcttgctgggaaatctttcacagtccagtaacagaggaagatattgtcgttttttcccacgaccatatagttaacccacttctctcctaccaaaatgaatagacagtcctctctaaaatgagggaggaaagctcttcaaatcctgatcactaagcatttacctatagcttatcaatatcttacgaaccaaaagccagtttatcttctcatgtcaccccactttcttttttgcttccccacatcagattttaagattacttggcttctcaatgtttagaatacctctagtagccaacaaagtaaggaatcacggaaccacagccttagctagcaatattttcatcttgaaaagtcatctagtccagaaagtagttgagaggctaaaataatcataaaggttctagagtcattcataataccaacctcttcctaaattcaccatccaccactagagggagagatgaatgaaaaaggccctagcatggaagtggaggttacagcatttctccaaggcaacatttaaggaagcccagttgaggcctttaatggggtttaagttgtcggctttcctgctcacatgagtgttaaccgtctatttcagaggcttgttggagggggcactgcagttcatggaagggttaaaccccctctacctccctttctttctcctccctgctcccgtgtcaggagttggttccttcctgtgggttcgtggtctcgctgacttcaagaatgaagctgcggacctttgcggtgagtgttacagctcttaaaggtggcacggacccaaagagtgagtagcagcaagatttattgtgaagagcgaaagaacaaagcttccacagcgtgggggggggggggggggggcagcttttgttcccttatttgtccccactcatgtcctgctgattggtccatttttcagagtgctgattggtccattttacaaacctctagctagctacagagcaccgattggtgcgtttttacagagcactgattggtgcattttacaaacctctagctagctacagagtgctgattggtgcattttacaatgctcttgtgagacagaaaagttctccaagtccccatccgacccaggaagtccagctggcttcacctctcactcccaccaatttggggtggcaaatgtagactcaattcctgccacttgctggcggtgagctcccaaaatccacctactgttgtttcttttgagaaaaaaaaggggctaataagaccagctctccctgttgtaagcttcagctgagatacaggacatagaagtacttcataagcattaacgtgctgtacagatacaaggatgtttactatttttctgctgcttcctctatctgcatacggggctaggggaatgccaagcagaagcacttggtgctcataaacccaccttatcatccctggagccctgatctacaagtaaataaaggatgagcaaagaaggaagggagttgaacttgttaaattccttctttctgactgttgtgaggccgcagcctgatttccctgaggctgactttgatgattctttaggcttcaggcaccaggattactttcatggctgcttaccattaattataggaagaatccacaaccctaatccgaaatcctttatctgacagcaaaagtgtgtgatttctctaaagacagctaattttttaatctaaaataaatggttaagctgaaagaaggctgtgcccttctcagtctgtacatgaggcattgtggcatagaacaaaaagggctggccgggcgtggtggctcatgcctgtaatcccagcactttgggaggctgaggcaggtggatcacctgagatcagagttcgagaccagcctgaccaacattaagaaaccccgtctctattaaaaatacaaaattagccgggtgtggtggcacgtctgtaattccagctactccagaggctgaggcaggagaatcactgaaacccgggaggtggaggttgccatgggccgagatcgcaccattgcactccagcctgggcaacaagagcgaaactccatctcaaacaaacaaacaaacaaaaaagaacaaaaagggctggacatggatgcaagttttgttccctttccagctttataaaagaggaacaacataagtcccagcctccccatcagatgaaccacactgcgtgataaacgagataatatgtatgtagttataaagaacctgggctatgatggcagacaacctggttttcaaagacttgccctgccacttactagacaagtgacactggtcaggttaacctttctaggcctcagttgtctcatctgtaaaacaaggctaataatagtatctggtttagaggattgctgtgaggattacgttgtaaatgcgggtgaagcactgagaatggtgtctggccataataagcacacagtaaacattagctcttgttattacaaagaatgtaaataagagttgaagactataaagcactccgcacatttcattagcaatggggtcaccattcgtagacaagtctcagctcagctttgcagcttaccgtcacagaggcagggaacagagctagcttgtcaagggtcttctcaggaggaagtggggaggtagcccatgaagcaaagtgatggggagggaaagagggggacataaagatcctgcagagaagttggctccgagtgataggagggtgtggggaagaaagaagggggcagtaaggattctcattataggactggccgggaatggtgtgaccactgattcaggaagtggggaagacgggaagagacttcaagtgtggggggagccaattcagataggaggtggcctagacaaggtgagggcatctcaaagcgacaccaagcctgggtgagatcacgtctggagccacagaaggatgaagcagtttatatttaaatgccatggcaaaacaacatccccaccattacaccctccattctcattcaagttcttcgggagaaaggaaaaatatggtcgggttcattgctattcagttttgaagttgagcctgcatttggacacaggcgcttgggagagtgggtcattttctttgacacaattattaaggaaaccgttttaaatgattccttgagtcccccaatggcccaggtggaaggtgctgtttcctggtacctgtccagccctctgagcttttctctcagcttccaaacgctgcagttgagaactagcagatcctattggtagtgccctgtggcccacactccttggtaacggtgagagtggggagtaattaggagcggctgccatgggccaggcattcaggtcaaggccgaggatggtggccagggccacagagccaggggacgggtggggacccagcaggcctgcggctggccgcttgctgagcgctccagcagcggggccctgggcggatgaagggccggagaaggccctctgctggggccgcggcgatcttgcagcgcctggacaccgaggctggggcactaacggtccgtggggctcccgacgtattcctctaacttcccctttctgtcctttcggtctggggccttttcaacaccccctgtggccggggacagctggggcagaaaccggcaggcggcagaagcctcaagcagnnnnnnnnnnnnnnnnnnnnnnnnnnnnnnnnnnnnnnnnnnnnnnnnnnnnnnnnnnnnnnnnnnnnnnnnnnnnnnnnnnnnnnnnnnnnnnnnnnnnnnnnnnnnnnnnnnnnnnnnnnnnnnnnnnnnnnnnnnnnnnnnnnnnnnnnnnnnnnnnnnnnnnnnnnnnnnnnnnnnnnnnnnnnnnnnnnnnnnnnnnnnnnnnnnnnnnnnnnnnnnnnnnnnnnnnnnnnnnnnnnnnnnnnnnnnnnnnnnnnnnnnnnnnnnnnnnnnnnnnnnnnnnnnnnnnnnnnnnnnnnnnnnnnnnnnnnnnnnnnnnnnnnnnnnnnnnnnnnnnnnnnnnnnnnnnnnnnnnnnnnnnnnnnnnnnnnnnnnnnnnnnnnnnnnnnnnnnnnnnnnnnnnnnnnnnnnnnnnnnnnnnnnnnnnnnnnnnnnnnnnnnnnnnnnnnnnnnnnnnnnnnnnnnnnnnnnnnnnnnnnnnnnnnnnnnnnnnnnnnnnnnnnnnnnnnnnnnnnnnnnnnnnnnnnnnnnnnnnnnnnnnnnnnnnnnnnnnnnnnnnnnnnnnnnnnnnnnnnnnnnnnnnnnnnnnnnnnnnnnnnnnnnnnnnnnnnnnnnnnnnnnnnnnnnnnnnnnnnnnnnnnnnnnnnnnnnnnnnnnnnnnnnnnnnnnnnnnnnnnnnnnnnnnnnnnnnnnnnnnnnnnnnnnnnnnnnnnnnnnnnnnnnnnnnnnnnnnnnnnnnnnnnnnnnnnnnnnnnnnnnnnnnnnnnnnnnnnnnnnnnnnnnnnnnnnnnnnnnnnnnnnnnnnnnnnnnnnnnnnnnnnnnnnnnnnnnnnnnnnnnnnnnnnnnnnnnnnnnnnnnnnnnnnnnnnnnnnnnnnnnnnnnnnnnnnnnnnnnnnnnnnnnnnnnnnnnnnnnnnnnnnnnnnnnnnnnnnnnnnnnnnnnnnnnnnnnnnnnnnnnnnnnnnnnnnnnnnnnnnnnnnnnnnnnnnnnnnnnnnnnnnnnnnnnnnnnnnnnnnnnnnnnnnnnnnnnnnnnnnnnnnnnnnnnnnnnnnnnnnnnnnnnnnnnnnnnnnnnnnnnnnnnnnnnnnnnnnnnnnnnnnnnnnnnnnnnnnnnnnnnnnnnnnnnnnnnnnnnnnnnnnnnnnnnnnnnnnnnnnnnnnnnnnnnnnnnnnnnnnnnnnnnnnnnnnnnnnnnnnnnnnnnnnnnnnnnnnnnnnnnnnnnnnnnnnnnnnnnnnnnnnnnnnnnnnnnnnnnnnnnnnnnnnnnnnnnnnnnnnnnnnnnnnnnnnnnnnnnnnnnnnnnnnnnnnnnnnnnnnnnnnnnnnnnnnnnnnnnnnnnnnnnnnnnnnnnnnnnnnnnnnnnnnnnnnnnnnnnnnnnnnnnnnnnnnnnnnnnnnnnnnnnnnnnnnnnnnnnnnnnnnnnnnnnnnnnnnnnnnngatcttcctggtgtccgagtgcgccctgatgctggcgcagggcacggtgggcgcctacctggtgagtccccgagccaactccgccgcgggccccttccccagcccggctctcgagcggccgcctggcccgacgagggggccgcccggcgctgggggcaggcgggcatgacctcggcccggcgtggaggttggcgagtggtgcagaggcggccgccgggggagctgccggccggggctgccagcgagcgggtagcgggcgggaccgttgatgccggtagcagctcgcgcgcgtccggctggggcagggggtgccgggggaggagaggcggcgggcaggtgggcgtgaaactattcctctcccccccataagagcggagcgagacggtgagttcagggttctccttggagaggaaagaaaaagcgtcggggttttcaggtgacctgcacatgggaagaaaaaccagttagcatcctgcgtcctctactctccattgcatcctcctcgagaacaaatctattatgcatcattttctccgggcgctttctacatccgccaattacagggggatataacagcttagagtgaaatgcgccctagtgtggccctggcctgagccggggctgcagggggaatattcccacccggtatccctatagccctctttgagcgtctgggataaagttacggtacctagagagcagctgcgagtttgtgtagttcctgctatccactcttagtgctaaattccccatcgtggtctgtcgcccacagaaggttgcaccattttccacaatgaatatgtattttatttgcctccagaaaggggatgttaatgctcagagggcccatgggtgcgtaacatttcagaggaaacagcttgtaatgactcagcactgtcaggtacctactttgtcgctttcgcctcctctgctcaggtggtcgcaacttgagttccagagagcgtgcttccacacctaagtacagtcctgtctaaacgggaaattttttttgagagtttatagtgttaaatcattacttggctattgacccgcaactggaatcaaatgtcatagactttgagtattcctgagcaagtttgatggagatagaattggacaagattttggccattgaataaccacatccagagatagaaccacgcgtatcctgatgctatgattaatccctcattcctggccttggggtaaagttcatgagggccagaggctgggggctgtataccattcataaactatctcttaaggctcagggctcactgttaaagggaaatacaagcagtgcttggtctccggtgttgaggaagttaggtggttgtgagagagggggtcttcaaactcagctctgttcctggggtgacagaatttcagggcttttgaaaatcaaatacatttctgttgctcattctgagacgaaaagcgtttacatcccggtctctgtcttgtgcattcgtaacttgtagactgcaagtgaaccctgtagtcaaaagcataccttgttttctgttctataaaatacacttattgtgtctatagttataatatgcagttgcagacagtacctattagcccttggaatttgagggataggggataattgtgttttgggagtcagtttatcggcacttccttaggggaaatttaactgttaaaatatttaaataagtacatgtattacagagatgcaaattcacattaataaaatatatgtgggtctgtactgtgacatatgcaaagtacataatacctaaccgggtctatgtttagaaggaggtaattagtatatcaacagctgcctccactttaacggtttgtttgcctcaaaccaattttgctcggtagagtgcattattcatgtgtggcaaacacccgcagaacttttcaccccaggagtgataaaagcgtgggcttactatttttcggttgcagtgatctaaggatttgacaaataaatgaagctgggctgcaactagatgaatggcctagctcctttagaaagttaagaagccgagtactcctggagtggtggacttctggaggcagggctggccccaggagataggaggttgactttaatcccagaacaggggaatggcaagcagaggaggaattcggtccacctggtggcggcatcctggcacttctagccttcgctgatggaaagcctggttgggtggggtagggtaacaggagtcaacaggtgacttgcagaaagcagctggaggcccaggagaggacaggcctaggaaattgaattcattttgattactaggagtggaggcataaggctctaagggctctgctttgcccggctgccctcgtctttgccttgccatcggagcctcatgaaaataaatagttggcttgtcagggttgactgacgcagcttgctatgggctttgctcttctgggccacttcagagttttctcttcatctgttatttgggagatggggaaaaaaagtttgctccttcagccatgcgagacttctctgtggataattggagaatgaaatattgcaggctgtttgcaggaaaggcacatttcttccttttaattcatcatggctttcttaggaaacctgagaccttgtgtctgtaggggaccacagggcagggtccacgtgctaagtgtgcgttatacgtgatccttaccttggcaatcagcctgcctctctaatgaggcatttccagatacttgaggaaggacttgccttgggacagtgccagtaatgctccctttcacagagaggagggtggttacaaattctatgccaacgatgttatttcctattagattcccagagtccaccttcttatttcatctccccaggtgccttaaaatattgcagtttcatttccttatttttttctgaaaagacaaatttctcagtgtcctgaatgacactagtgtaggcttcccaactgcagaactgaagcagaaggttgcctgtgatttaagaagcaactttgagaaggaggactcgtgtgtgtgtgtgtgtgtgtgtgtgtgtgtgtgtgtgtgtgtgagagagagagagagaaaatgtgtgtgtgtgtctgtgtgtgtgtgtatgtatgcatgtgtttgttttccaccaagaacctgcccagggaggaaactcaaaggaaaactgtattgtatataaggccatcaattgttaggctaggctgggggcctgcaacttttgccttggtgtcaggcagtacagaaagacactgatcctgaaagccagactcagtgatctagataaagtaacccaggtgcaacctgggccaactgtggattctgaaatctattacggttacaaacatcttaactggaaaccatgcttcagataaaccaatagtcacagggatgttccatcatagtcacctaaacctcctgactggctatgacataatttttgcagcataagaggagaggcctgctcggtttgatagtcattttgtatggaacagagaatgcaatttaattttcttctacttgggttttggcttcgagtggctccagtcctgtttgcaaggatgtaacatgtgcttaagtcttggactggttggagaagatgcaggcatatgagaactgcatggggagaaagtcattttgtgtgtgcctattggtgttttgcagagaccccctaaaatgttttaagccactcgctgagggtagccctgcatatagaggtttctgtgtggtatcaaattactgaggactggagtagataagggtgtgtacaggaaattaaagcctctgacacttctagatgattagtttgaggcatacatacaaatacatttgaatttcctcaggttgaaaactgaaaaaaggccagtctagtttcctgggtggggcacaaagggagttcctgtgaacaaggggtaggtatttccctatttagagttatagaaaaataagtttgaggttgtggtgacaaaataatgacatagatgactgagtgtggttaatgaggctctatctcactgctttgtagtcacactttttctttcagcctgagaatagtcaagtgggcttgcaattaatgggtgaggcgaaactgctaggtttgttactccttttttttttctaaagaaacatcatttcgaagatgagtttctgcatattcaacccagaagcagacagctcaggaaactgtctgttgacattttcaacagagagagacatttttaaagtccttgtcaaattactatgatgactaaggtaaccgtattttatttaatcaaattattttatacacttatgcttactcaaagtgacaaaattccttgccatttccataattactatgtagccccaggtagtaagaaataaaattaccttgattttttttttccttannnnnnnnnnnnnnnnnnnnccttatagctagattcaaaatgttaataattattaagggaaaaaggtgtttctgaaaattcttttcagccaggtttgtgtatttatctttgtttgtgagggggtttttgttggtgtatttaacaatagaagaaactgaatgagttgtaaaatgagcgagggctctatcctgcattttgttaactcttcccctcattcaattttagacaccttatgaaaaggatcgccaagaggcctctctgcagtggcaccgccttgctaatcaattgcccagcatttgcagctcatcttgggtgctgctggaatcgtgttttctgttatgctgcatgggctgcttcttgcacgaagtcattggtgaactgctgggcaaaggcagccccaccaacagggtctctgtgaatttattttgcacacctaaaagcaaactttgaggtgctgccttgatcagggactgtattctcttagcagattggcctggatgaacaagggtagtattgcaaaaatgatgaggatacagctgcatttcatgcagaaagagtgaagaataaaactccctactagctgcatttctctggctttagttccaactcgcgcagatttcactacatgcatcatttaataagcatgtttctctaaagtggagtcaaagtacttctcttctgcatatgtactctattctgtacattgccgcatgcattgcatatttacatacgtgtttgtgtacagcgttgcatacaatgaatattgtatgccatactttttgaaggtgcgaagggacatttcaatggtaactttgactgtatggttgacacatggatttggaaccgttctcccctgaagaaaatctcggtattttcttgcctctcggaaatgcctttggtaatctgtaggccagaaagatagcatccttactctttcaattcatttttattttcggtttctatgtctgtatctggaaaacagatataaacaggaaaaacagtggaatcatggaccttggctcataggataaatgaattgatgtgattcaaagacacttgtattttatgtagcctaagtgtttatgtgttagcatgagacaaattattgcttaatggttaaaactccaagttaaatgattacagttccaaggtggagaaaggcaagtgtctgtggcagctgtcgcttattcgatgagtgttagaagactgggattcatgcctatgtcctccccttacctgctctgtgaccttgagctgtttacttaatctctgtgtacctcaatttttcattttataactggggttataatagtacctaccctctgttttgctgtgaggatgaactgagtcagtacatgtaaagcaccttgaacaatatctggcacatagtgagtgcccaggaaatattagctattactattaataataatatggttatgcatatttactgcaaacataataaccgtgtagccccaaccaatgagaaataaaattatttcaattaaactttagttttggtttagtgaattgcatattcaagtagtttcctattctacatggacatttttgtctgggaggtaaaaagtttttaagggcaagtaataagctaaatatcagttgctaattctgtttattcccttataaatatagcaatccatttcatcttaaagatgctataaaaattagtcacatgggagaggagcccactgcaggaatggtgattcatgttgatcatttacagtccatgggtacttgaaggaggttaaagcagggcaggcaggactggctgggcggggcaggtaccctgatgcttcactttgggaggtcctcagtatctcttgctgtggtctgtggccactgggtgctgaaggctgagggtaggtggaaagaatgttggacttggagttggaagacctggatttgaacttagacttgctatttcccagctcctggcaacttcacttactcgagcctcaatagcctcatctgaaaaatggggataatgatcaagcttatcttacagatggttgtgaggtttaaacaaatagtcatgtgatagagtacttctcatagggtacagtattccacagttgctttaacagtaatggtataaccctgctcgttgacattagcaccaacaaaagtccctcccagggagctgaggatttggaatattgtgtgaggccaaggcttctgtttcctaaactggtgatctgggctcctgaagcttgctctgcttcactggctgaaaggctgagtgaccaattcaagggagcccgaggtgtcaggagggcgaggacaaagggacatatgttgtggacatatgctgccctccaggcagccttgtttaaaacgtgccttcgcagagctcagccttggttgcccagaggggctcaggtctcacgtcttgtctgctgccttcacctcgtgttctcttgcagtattaagtggactctggcaagcaggtctgtgggcatttccccacgcttggtctttttttttggtttctcataagcagaacaatggacctgttcctgcaacctggtttcccatcccatggattcatccatctcggcttacggacataccttctgcacaacaccactcccgttccatctgtagtcttagaagcagccttcccgcccccagtctggtcacacctgtccttgcgaaggatagagaaggaattgggcctttctcagtgaatcaggtggcagtgtatgttttaggtgagtttttagattcaccttcaaatgccacaggcttcaggagagagtctgtgctcagaagacctcagagccccaaagccgggtcactctgatgactttgccgagggaggaattgtgtgtaaagcactgaatcttgtgcagccacaggtgtggagtgagcaagccaggggagccttcatccatgagttccagtgacaacacagagactggaaacattcccttggatgtacacagaacctcagcagttggtgactcccaacttctttatttcggttcttctttgtggttttgagtcgagtgcctctgaaaagggaagcccttactgaggacttagcagctcgattgtttagtagaaacggtgttaacagcctcgttatttcccatatgactgggcattcctctttaaacacggaatagttggtcattagtactttcctgaacttagacaatagttgcacttattcctcctaatcaacacacattgaaaatatttaaaagcaaaaagtaacataggctgccataagccccacttttgttgttgttgttattttgagacagggtcttgctctatcatccaggttggagtgcagtggcaggatcacagcttgacgtcccaggctgaaatgatcctcccacctcaacctcccaagtagctgggactaccggcacataccaccaagcctggctagttttcttatttttttttttggtagagatggggtgtggggtggtttcatcatgttgtccaggctggtcttgaactcctggactcaagtgatccacctgccttggcctcccagagtgctgggattacaggtgtgagccacggtgccttgccaagccctacttttttcagtggggtggggcgggtggggcaggaagaagtgtgaactcatctttcccttttgccctcatgatttcctttataaatacccctgccatgacttttcagtactctccttttcatggacgtaatagtccaagtggcattttaagttatctggtaatggactcagagagcccactgactgtaatgatgaagtcttatttttttattttttattttttttttgagacagtctcacactgttgcccagcctggagtgcagtggcatgacctcagctcactgcaacctctgcctcccgggttcaagcaattctcctgcctcagcctccccagtagctgggactacaggcgcgtaccaccactcggctaattttttgtattttttttagtggagacggggtttcaccatgttggccagggtggtctcgaactcctgacctcaagtgatccactcacctcagccttagcattggttttggttaaaatctttgccctctgaaaattctgggaacaggctgtgcccataaacccatcccataggcagtgatgggactaccacatttgttctgccaggttgtcctttgggacaacttttgggtgtctggataatgaacctgttcagataggccttgagactttcttggtagctctaaagtctcttctggctctccgtccattgatacctaaatttctagttgtgcagagcgtgaagaaatgagcaggggctgatgaggcttttaacaaatagttccggagaaaataatagaaggcaaactaaatccctgctcacaaaactacaggaatttgagggagttagaagtgattatttttaccgccatttctgcacttgcaaggttgatgtagggagaagtgtcacaatgatgtttttcatttaaagactactgtaaaatattaatgggaatggctattgtctttcaccccctttgcaagaggcttatgtaaaataggcaggctgtttctaattgttgaatttgtctcccaacttcagctgattagaaggagaaattaccaccttgaatataagcaggttgaaattgggagagctgccctcagctgattatataagctataaaatacagcacctaaagtcttatgtttactctgctaagaattcccttaatgaagatgaaaatttctaagcagcatggacccatatgtgtttattatgtaagattcaattatggtgatccaacctgtaaaataaacagtggggctgattaatctctttgttggcttttgggtcagagaattgtttaaagtagatccacagagccacctagagctgtccccctggaactcagctggctgtggtgtcagcaccagctccccttctctccaggggtacaggaggcttgtcctgggtctgtggtcactgtagctttcagggtggtggagggcagggcccccttaaggttggctttcgaggttgctcgtgcagtgtagtgggatggccgtgagtacaaccactgccggttgtgacagacaccatcctttggccgtttcatttctcagagtgctgctgtgatagcacttggaatttactgtgtcttgtgggatgctttgcataagcagcatgtattccagtgtggcacatcacaccatcctcttcttgaagctatacatgcgtggggtgcacagcacaccacacggtcaagttcagctttccaacctcctcctgaaatgtaggaaaggagcatatttttttggccggagtgatgattgaggagaagaaacttaaagggagccaggcccatgaaatagatgtagaagagcttcagagaagcctctcctgtccttatgcaaaaaactgagggcaagactcctgacttattgtgtggcatgtcgtgtcgcctccccagtgctggtacatactttgtaggttgggaggcttaacatgccagtgacagtttctcagccagccaaagagaggatatcttttggaaacaaaaaccataaattagcaccattcctttacctttgccaagctgtatacatgcatcaaggagatgcatataaatagatcaaaaagccagtgagcagttttgcagctttgcagcttgcacttgatggaagcagatggggaggttctccttgctgcactaggctcagagtggcacgtggagccagcagtgcttgggctaaatccaaatacaaccttgttcgatttctagagatggacatgtgcaatcgactgtccaacaggcatattgtttctgtggcccagggtgggcctgtttttaggtcttcttaagtataacatcgtagaatctctgcattcattgctttcatgttaggcaaaatcagggcacagaattgaggcatttacccaaatgtgcagccccaccctccggagccagctcacattcgctggcaggtataagcaggtgagcagccaggaaggaaagacaactgatagttttaattttgggaatagcaattataaacaagtataaataaaaatattgttttggtgaatactggggaaaaatcacttctcttattctcttttaaaatgttcctcttttttttttttttttttgtctaaataggcttaatgnnnnnnnnnnnnnnnnnnnnatgtcacagtcacatgggtagggactctgggagtcaagacctaggccactcctgagtgggactgtcacggcaggcatttgcccatgggcagtgtcctttctgccccctccgtggttggccacccgctgtccctatccagtggataatggagctgagcgtggtctcttacaagcctttcagatccaattccacctttcaccacagactgtatgtgattcctgccttcctggactaattctgagctcttttgtactttatttgggaacaggaataagtggggacttgacattttatttaaacttttccttttgtagagttcgtaggacagtaggattattccctaacattttcaatatctcagatgctagaccaaaattgggtcatattataagtgagaaagtgactttcacagtttatctgttggtgaggtggacatgggcttggaggggagagggtggatgagatggtaggcatttcagaaggaaaaaaccaggtctattcattaactagggctgctgtaacaaattaccacaaactgggtggcttgaaacaaattttttgtctgacagtcctgcaggccagaagtctgaaatcagggcatcagcagggccgtgctccctcctagaccctgcgtagaacccttccttgcctcttcatggcatgtgggggtggccaagggtccttggattccttggctcgcagctgcatcactcccatctctgcctttgctgtcacatggtgtttcccccgcgtctctctctcttcttcttctaaggacaccggtcacattggattagggctcaccctaatgacctcatgtgactagcttacatctgctaagtcctcgtttccaaattaggtcacattcacaggcactaagagttaggacttcagtttatctttttggggaaaacaaatcaattcataacaccagagaagaaaagagcaaaggatcctaaaacagtctgtgtgtacaaagaaaacaaaggcaaactctgtcttcttaagtgtttgggtgaggtaggaggattgttggatattcgtaagagagtcgttcatacccaaagatatcatttcaatcttcacagaaatgcggacagtccctgtttcctttctgtaagaaggtaaccatgttactctctggggtggtggtgattagacttgcaggaatgaacctagttggatgattcgttagcttcaaacacatcattttctcttcctgggcctagccgaatgctgggattggactgatagtcatgtcatttgattaaggagaatgcatgtaaaaaaaaatcctagacagatatgtgggtgaggaatatgtgtttgtgtatttactgtgtgtatgtacataggtactcatccatgttcccatccctcacacccaggattccttagcaggaatcagggctggtaaaatctgcagctggctctgtctccttcctgaagccctatccgattcagtgagaccaaaagagactttatcactgtgcgctgtgccagccagtctcagatttggccaggtatgtattaagttagcaccagacatctgcattctaatctcatccatctctgtggtttttttggtgggggtaggagtgatatggttcccagaatttctctgcacaggctccttttttaaaaaaaaaaaaaaaaagaaaaaaaaaatgtcagcttgatctctgccaaactaattaacttcgacaacttccttaagtgctgcgagcaatatagagttgagtaaggcatgttcttggccctcatggagttgatttatcgtggggggggagatgacatgtttataattttttcattaatgactcattcattaggacgtttcaggtcctgggccaggtggcagccaagccctctggaagcctcatgtctggtctagttgtattacaatagaccagactaaaaatagaagcaaagcattgggccagggtgggagatgggcctgggtagactggtcggagatataaaataattttctcaaccttggttggggatagatccgagggtagcaagatgtcaagtggaaccgttggtgagaggctggctgcggagagtcattggaggcagcatgtgattggaaacctgggatggagaaggggagggctggaaacccagggccacagccgggctggggcatgtcagggctggcactgtggagtgccactccagttagcagcgcggaggctgtcggcatctctctcggccaagcttggatccctctgcccctgctcccctgctttgaagtggtgtggtgaaatgtggctggaagtcagtctgctagcctgtggagggaccttcatccagggcatgctcagactcagctagaagcaagcacagcttcctcgcatgctgaggccaaggggctgaaggatgcagaatgcttcttgtactggaatgctgtgctcaccagtatgggtgccacatgggaggggggcaaatatagggtcctgggcctgaggacaaaatgacacctctgtattaaacctctcttttgcatatgtacaaattagattcttgcaagatgagctaacattaggaaaggtcctattatatttgactttttttttttttttaaataaaaccacttttgcttggcctcggatgtatcagttctggataactttaaagctggtaacagaacaaactgtgttcacacacaggaaatgtctccaaacaaaaagtgggtgtgcagtttacagtttaaaaattggatgaaggcccttcaaacttcccctcctgttctccttgggaagagcttggcaggctgctgagagaggccactcctccctggaataggtagtcaccggggcctgggaaggaaggtagcctgtgagtggagctgcctggtgactgggcggaggccccgggtgttctgggggctgggaggcctgtggaggtttcctttcagcttcaaggactgtgtgaaaggttgtgtgagtcaggtcaggaagcatttctgcgctgttgctccaagcctgtggccggccgatccaagcgctggctgagctagctggaaagctctgtgagcatcctatgtctgtgtctttatctattcatcgcctggctctagtgctagcttcaacttcaagttcgtgctttttttttaaatttttttttgaggggatggagtctcgctctgtcgcccaggctggagtgcattggtgggatctcggctcgctgcaacctctgcctcctgggttcaagtagttctcccgcctcagcctctctagtagctgggattacaggagtgcactaccacgcccagcagatttttgtatttttagtagagttggggtttcgccatgttggccaggctagtctcgaactcctgacctgaggtgatccacctggctcggcctcacaaagtgctgggattacaggcatgaaccaccacacccagccggcttttttttttttttttttttaatataaagactttactgttttacttattacacaaggaatatatgtggtgttgacaatttggaaaatacaaataaacatagataacataaaaaaaaatccataattcagagaacctggagataaactgtaaacattttggcgtgagtcctttaagtctctctccgtctacctgcattgatgcgtgacttccaggcccacacggtggtaaaggatgtgggctttggggtctttgaagtccatgtctggggctggttagtcttgtgtggctttgggcatttagctttccctctctaattctcaatttcctcatctctaagattgggatgatatttatactttcaatgatcttgtgaataccaaatgagagaatccatccaaagtactcagcccgtgcctctctgcagtatgtgctactgtcgtgatttttaaaaagtaataaaattggatctcactataaattctgtttaggaacctactctttcctctaaatcattctcatggcttttctgtaacatcagatgttcttctctgctgtcatagtttcaaatgaaaaatgaccttattgtttttataaaacaatacatattcatcatgaagaaaagtttatataaaaatgtttttaaaaattcaaaatcccccattcagaaataatcatgactggtggtggggtttgagaagtgaccgttaaccgcaccttcctctctgccctcactctagccccttctaattaagaatccactgggagccgggcatggtagctcgtgcctgtaatcccagtactttggaaggctgaagtgggaggatcacttgagctcaggagtttgagaccagcctgggcaacatagggagaccctgtctctacaaaaaatttaaaaattagctgagcatggtggcttatgtctgtaatcccagcactttgggaggccgaggtgggtggatcagttgatgtcaggagtttgagaacagcctggccaacatggtgaaaccctgtctgtactaaaaataaaaaaattagccaggcatggtggcacatgcctgtaatcccagctactcaggaggctgaggcaggaaaattgcttgaacccaggaggcagaggttgcaatgagccaagatggcgccactgcactccagtctctgtctcaaaggaaaaaaaaaaaaaattaaaaaattagctgggtgtggtgctgcatgccaccacccagtctcccagatatttgggagactgaggtgggaggatcacttgagaccaggagattgaggctgcagtgagccgtaatagtgccactgcactccagcctgagtgacagagtgagacactatttcaacaacaacaacaaagaaaggatcatttgggaagtagacaccccagccagccacaggggtttaaaacatcatcttgggggttgtgtggaaaaaactgcagtttggattggaaaactctgtttgtgtccagattcaggcttcttttcactactttgttctcagaataaaactcttccaaggcagaactgcaggctttgtccctgcagatgctcacctgctcaggtaagcttacctcctggaggagcagagaatatgtgcatcctgagggctgttcacagaattgggggagaagggggtcagggcaagcttgccagcttcctgcttgcaattctgtgaatcgagtaagttgccaatccttccctttggggaggattgagtgaggaagttagaagagcagatgctttttctctgttaatttccagaaggtggacgttcgtctagtctatatcaaggtatgaattctggggaaagggaagaagaatttcttgttattattaggaatatatcattttagagttctttctattcttatacatggaaaaatgactggctgagtagatatacttataaaatgtatgttctaaaaatagcagtaagtttaatttcactgaaacttaacagaagacttcagtaaaactggaaagaagtaactatcttttgctactaaatgttgctgtagaagtgtccaaggccagccttatttttcctcccttagagataatttattattgcctataggttagatatatgaggaatcttttcttaatatttgacagataatttaattctgatgtatattactgctgtgtgatgtgtgtcatagtttttggaactggatgtgtattttcaatcaacagatgcaattctttattagttttgggagaatttctttgtattatctcttcaaacactgggttctatgcagtgaattctctgctgtaaggcaccaattgtctgtatgttacattgtctttgaactccatagttgtctgttttgcttcgattacttgaatccctttttttatctgcattcaccatgtttatttttagctttcctctagtcagaaaattgattttaaaccatctttctttagtcctgtgtagattctgtttcatatctttattttctagggttggctttagttttcaacgtatttctttagatctacaatcttttttttttcccttttttagatgttgtctttgggttcttgatgtattgaactcatattcttattaagttctatggctcaaagatcttttggggggtatctttctctggctgagttacgttttcttttattttgagttctttgtctttgacacctactgttgctttcttgcctttccaggagtctgtgtttaaagataaccatgccttgtggtttttcattttattcttgctgaagtaaatcaggctatatctttctttgatttatttatttgaaggctatcttttttcttcttgctaccaagctgaagtttgaaggctggttttttgtttctgttcatgctttctgtagcctgaagacttatgaaatgtcttgggccagttgagctgtagcaggtcgtatgctgggtgctgagtaggcttggctagatgtggtcttggcagctttcacttgtgggatcttttgaaggcccttttaagtgggttcggtcttcctgtgtggggggcacacactgcacaccctctggcagtattctgtggcctcgggtcagccttgggtttcacgttggactcccagagtcttcattccttgcagcagagatgatcaacaccacggtttatgcatcatctcatccttttctccccagcagatgttttctctcttccctagtcagaagaagagaatatagggataactactcaggtgtttttttctagatgtggtgatattgatgaaaactctcagaatgtttatttattcactgttttgtcttcctgagggtgtttgactcagggctctgagccttgccacactggattctttttcctttattttatttcccaggcaccttttgactttatgacactggggtgtgctcattttgttttttttggttttttttttttttttttttttggctgataagtgttttatttcaggtttaatttttttttaattcaaatttaggaagagtgagattttatacagaggtttaattctaccattttaactgggaaatgtctagcaacatttgaaaagattgtgtaatattccattgtattccatttccctatttctgtatggtaggttgcttatggttttgttttgctgatacaaattctggttgctcatttcttttcattgttttgcttttcagaattacaaaatgggatgatgagttcaagggattggtcacaaaagatgtggggagtcaaatcctctgtggaaaggggaattgccttcgtcgaggatgtgatgtgtgcccgggaggacacaagcagtctgatcgaactctcacacaaatcccatgcagtagatgtcattatttctcttttccgtataaggaaatagggctcacttctagaagttaaagaatgtgctggatgggcacggtggctcacgcctgtaatcccagcactttgggaagccagtgcgggcagatcacgaggtcaggagttcgagaccagcctggccaacgtggtgaaaccccttctctactaaaaatacaaaaaaatagccgggcatggtggcagttgcctgtaatcccagctactcggcgggctgaggtaggagaatcacttgaacccgggaggcggataggttgcagtgagccgagaccatgccaccgcactccagccagggcaacaaaatgagactccgtctcaaaaaaaaaaagaaaagaaaaaagaagaaagaaagaacgtgcccaagnnnnnnnnnnnnnnnnnnnnnnnnnnnnnnnnnnnnnnnnnnnnnnnnnnnnnnnnnnnnnnnnnnnnnnnnnnnnnnnnnnnnnnnnnnnnnnnnnnnnnnnnnnnnnnnnnnnnnnnnnnnnnnnnnnnnnnnnnnnnnnnnnnnnnnnnnnnnnnnnnnnnnnnnnnnnnnnnnnnnnnnnnnnnnnnnnnnnnnnnnnnnnnnnnnnnnnnnnnnnnnnnnnnnnnnnnnnnnnnnnnnnnnnnnnnnnnnnnnnnnnnnnnnnnnnnnnnnnnnnnnnnnnnnnnnnnnnnnnnnnnnnnnnnnnnnnnnnnnnnnnnnnnnnnnnnnnnnnnnnnnnnnnnnnnnnnnnnnnnnnnnnnnnnnnnnnnnnnnnnnnnnnnnnnnnnnnnnnnnnnnnnnnnnnnnnnnnnnnnnnnnnnnnncagcaaccctggggacatctgtggggcaattttgccccacttttgtttttaattctattatgacgaaacaaaaaagtagaaattatagtacagtggacacccatgtactcaccacctaggactgactagttgttaagatttgacacatttgcttcatatatacagctacattcatacacacacacacacacacacacacacacacacacatacatacatacataatttcaggaccattttaaagtaaattatagaaatgatgacacttcacacctaaatacttcagtatacctcttcataaactatggtcatttccctataaaactgcaaccctactatcactcctaacaaaattaagtagtccctaatttcaattaatacttcctacatatcagatttctccaaaatgttcccaaaatatctctatcgcaattgccatttctagctctatacctagctttctctggaactatttatttgtttataaacagccacaaaccaattcaagatcatacatttcatttgttctatgattttgtgtcatttcctttgttttttttctttattgtggaaaattacacataaaatttaccatcttaatcattttgaagtgtacagtgaactcagtggtgtagtagtcccccttgctcttgggggatatgttccaagacccctgatatggatgcctggaaccttggatagtactaaatgctatatatgatatggtttttcctatatgtatatacctatgataaagtttaatttataaattaggcacagtaagattaacaacaataataattcaacataattataacaatatgctgtaataaaagttatgtgaatgtggtctctctcaatacatcttactgttgctcactattttctgactgtagttgacctcaggtaactgaaaacttggaagtgaaactctggataagcggggactcctacattaagtatattcacaacgttgtgcaactatcaccaccatctacctctggaactcttcttcccagagggaaactccatacccattaaagatcactgcccactccccttcccccagccctggccaccactgttcacttcctatctctatgattctgactaccctagggcctcatatacagtgtttgtccttttgcaacgggcttgtttcagtcagcataatgtcctcacaggtcatccaagttgggggctgggtcagaatttccttcctttttaggctgaattttccatagtatgtatagaccacgttttgcttatccagtcgtctgtcgatggacacttccgttgcttccacatgttggctattgtgaataatgccgctccgatcatcgctgtagagctttcatctggaataatttccccactttttccccactaggttaactttttgaaggggttgggtcagttgtcattccacagaacatcttctgtaatgtttcgtattctgaatgtatctgattatttcctcgtggtttcatttaacttgtctcttttctctgtatttcctgtgcaatggaagttagcttttgcttgactagatttaagttttgcttgattagaggagataattggtgaggaattctttcaagtacattgtattaaaacacctggttgacccctgctcatggtgctaaggctgaccatgaggttgagatgggtggttacatccacaccactccacatgaaacagacatttgccgccttgaagttggcagacagtctgtgttggtgcccttttaatagatgagtcagttgctgaaattctgagtaggctctgacttggttaccagtgatctctaccatttactgagcatccgctgtgtgtacctgacacatgtcatctcatttagtcctttaggggcggcagtgttgtcccacattgtagctcattgtaggagatcctagttgcacttctgttatgaagccactcctgcctccctttcctctgaccctcccctcccactgtggatcatggtctcctcccccagctccatggcatgatgttggcactgcctttccagtttactctctccacagggtaaaaactggactctggagcaagagactgcctggattccaatcccagctctgcccgtcacatgtgacgtaaacctaggttggttcctcccccgtcagttggagatgattaaagtacctgccacagagggctctcctgagcgtgaaaggagttactgcctgggaagcacttgtgtgtgataagtcttagcctcattctctgtcattccttccatcggtccctggagacagttgctcagtccgtgttttgctttgaaggttttgccgtaactcacaatagagaaacacaggatgactgaaaatcaggtaataaacatgaagcagtgacagtgattctagagcaggggttggcaaactatagcccatgggccaaacctggcctgctctctacttttgtaagtcaacttttattggaacacagccatgctgatttatgtatatattatcatcatcatgtgacagaaaccatattgcctgcaagtaatatggcctgcaaagcctaaaatagctgctatctggcctttacagaaaaggtttgctacccctgctctagaatcttaaagaattcttagagttgtggtctcagatctctagatcccagagatgccacctcagctgagcgtggtggctcacacctgtaatcccagaaccttgggaggacaaggtggacagatagtttgaacccaggacttctagactagcctgggcaacatggtgaaaccccttctctatttctataaattaatttttaaaagccacctcctgctaaattcttgtcttcagctttcactcccaggagtggcattgcccaaccttcccagttgggaaagttcatttagtctgcctctaaaggaccaaatgagataaagtgtgtcaggtacacatagcggatgctcaataaacgctagtgactgtgatcactggtaaccaagttacagcctagtcaggattttggcaagtgcctcatctgttaaaagggcaccaacgcagactgccaacttcaagggagcaaatgtctgtttcacatggagcggtctggatgttaccacccatctcaatcccgtggtcagccttagcaccatgagcaggggtcaagcaggtgttttaatataaagtacttgaaagaattccttacaggtatctcctataattaagcacaaattaaatctagtcaagctacctagagctggaggctgacttctttatctgagcaggcccctcctgcagatctgaggctggcaagcatgggctctggataagtggtaggttccggaggcctctcaactggaactgttctctttactgtgagtcttttctcccagccagtccactgagtaggcctgcttttgttttgcacagcacctcacaggtgacccagcagggagccctggtgcgctcttctctgctgtccagcatggatgtggcctatggtagagggactgccctgtgggatcacaggccttttctgtattcacattgcctgcccacacacactaaccatcacagctcattacagatatttgacttttgccgatatgtttggggttctgctgtttgacccaaatggatctgattcaaatccattgaatgagaaacctcaataccataagtttcttctgcattttcacagaaacagaacactttcctgaagtcattctctattatgtgcaacttatgtgacttgatttatttcttgatctttaagatagtttttattgatctgaggcattaaattgaattctgatgtgaaagaatcttttcccttatattttatgttgtctcctaaccacttaagtagctgtttaatcttttaattaagttggtgtgaaccttcttcaaacgatgatggctgttctccttgtatatattttaaaattttgatatcagacctccctctctaatctctcttaaccttaaaaattttaagatgttcgtgttctttgaagctactttattaattcaagacctatttattgagcttctgtgacttgtcaggcactcttctagatactggggacccagcatatcaaaacacaagaaatcgctataaagacgcttacgttgtggtacttttgctcatgacatcactgcaaggtttgatattcttcagagagtggtatggtggccgaatgtagaagtccattcaagtcacagaggagaaaattgaagtggatctgcagaaacagaggctccacagcagtgaagaggaagggaggaaattttagggaaggcctttgggaaggggaaggaggtaactaactcccttggctggaaggtccagtcaggtaagggaaggttttgaaggctaggctcaatctagtgggcataaaggagttacaggtttttgcaaaaaggggtgtggtctatagaaggaggcgttttaggaagctagtagctcaatgaacctacaaaaaaatctgagacctgtagtctgatctaagcctgcagccaaaagttagggagtcaggtgtttggatggagccacccttccagctctccatttaccaggtgatggggccacacagggagcatccctgtggaaggactagaatctcagggctttccttaggtgaggctgcaccggaacagagagaactgtnnnnnnnnnnnnnnnnnnnnnnnnnnnnnnnnnnnnnnnnnnnnnnnnnnnnnnnnnnnnnnnnnnnnnnnnnnnnnnnnnnnnnnnnnnnnnnnnnnnnnnnnnnnnnnnnnnnnnnnnnnnnnnnnnnnnnnnnnnnnnnnnnnnnnnnnnnnnnnnnnnnnnnnnnnnnnnnnnnnnnnnnnnnnnnnnnnnnnnnnnnnnnnnnnnnnnnnnnnnnnnnnnnnnnnnnnnnnnnnnnnnnnnnnnnnnnnnnnnnnnnnnnnnnnnnnnnnnnnnnnnnnnnnnnnnnnnnnnnnnnnnnnnnnnnnnnnnnnnnnnnnnnnnnnnnnnnnnnnnnnnnnnnnnnnnnnnnnnnnnnnnnnnnnnnnnnnnnnnnnnnnnnnnnnnnnnnnnnnnnnnnnnnnnnnnnnnnnnaaaccatcatcatgtggcatctgaagtagggatttaggcctttttttttttttttttttttgagacggagttttgctcttgtctcctagcctggagtgcagtggtgctcaactcactgcaacctctgcctcccgggttcaggtgcttctcctgcctcagcctcccggatagctgggattacaggcacgtgccaccacacctggataatttttgtattttagtagggacgaagttcaccctgttggccaggctggtctcaggtgacctcaggtgacccgcccacctcggcttcccaaagtgctgggattacaggcgtgagccactgcgccagggcgatttaggccttttcagtgggctccaggattgcagatgtgttcactgtccttggtagtagccaaatgccatcagaagaaattagctcatggactgtttgcagggcatggtgtcatctcatggtcttctaaatattggcccctacagctcagagactagatgatgggacacttgaagcttccgctcggtatgcagacagtgttaagaatggcatcgtgacagggacagatcagcattcctaccacactctgttatgttttaaaatcagattctcgttttatgtcaaaccatccagaactgtcatctcttagccgtctttctcacaactcaaagcgtagattttcatgcccagaaaaattttcattcacagacatctaaacaatgaaatacttatagtaactgaaaaagtacccatgcttcatcaaaaggaccttatgcttaaagagagaaatgttgcatatcttggagattttataatttttttcttacacttaggaaataagaatttgggctttttttcctccttaccagttttatccatttctctcttgtgaatagttgcagtcattcttcctggcattgaagtatttctgaaatagctcttcttatctaggcataattacaacatatctatgaagtacgtgactctattttgaaaatcagcctgtgatctgcacacttgcttctgaacacacacttctacccacatgcaaattctgaagggtaagcacgctgaattcggcagccacttttccaaaggcaatagagtaatcggataggccatggttatatagaatatctgttggcataagggttctactaaaatatttattgcttgaccctgagtgggtgcctataaagcaggtacgttttgcacaccacttacactgtgatatgcttggtatctgtcacttattttttctgcctttttttttttttaaagccaccatctgcattttctactttgaagtacattagttactatggaaacagtgatgtcattggtgggggtgagggttagtaacatctacaaggacagtataaaatcattttatttaatgggttgaaatttatatgacacttgggagaaatgatgagtatgcttaagagaatggtgtgggtatacaaccgtagctactatgatgcctatacatgtaacaaatcagcatttgtatggtttttaggttgcaacaaaaatatggctgaaaactaagaaaaatacgaagaagagaaaatggaaggtcagggcattcttataattgttctagccgctcagaacatcattttctgaaggtggccttctggttaatacaaatatatagatgtccctatatagatgtaatttatatcagctaatggtccagttttcttctatagagatactgtcatgggacaggtttttggctttctgaatgaaatttgtgttccaggcagtagtggttcaattctgacatgcaaccaagctcttaacgagattcctgaagaggatcccatggtctccgaagctccagacagagattttatgtaaggacagttgtgtgtcgcagcagagatggcacagtgagtcccaggaagggcccttggatctctttaataagatattcagggctctgtgcagaatgtctgaatgaagctggctgtgttcctctttcatttagtctccttggaaagaaaaagtgctccagatagatagatatgctcctcaacctgcttgtatgtgtatccgtccgtccgtccatccatccatccatccatccatccatccatccatccatccatctatctatctatctatctatctatctatctatctatctatcatcctgagatgatggtagattcacatgcaattgtaagaaataatccagagtgatcctgtacacactctacccagtctcccccaatagtaacatattgcaaaactgtagtataacaccacaattaggaaattgacagtgatagggtccaccaacagatttcctcagttttaccagcactcgtgcttctctctctctctctgtgtgtgtgtgtgtgtgtgtgtgtgtgtgtgtgtgtgtagttctctgcagtttcatcacttgtgtggattaatgtgaccaccaccacaatcaggatatagaatctgctgtacatttattgccacagtctctcctgctccctaaccccagggcagcactattctgttctccatctctctaatgttgtcattttacgaatgttacttaaatggcatcatacagcatgcaaccttttgagattgtttttttttttccactaagcacaaatcccttgagatccatccaagttgttgcatatatcaataattcatttctttttattgcagagtgatattgcctagtgtggaggtactcctgttagttaaccgttcacctcttgatggcatttgggttgtgcttatctatttaaacagaagtatctgggagagggcttttggggtcctaaaagcacagaatcaggaagcagtgtaaagtgccccagtctctgtctatggttctcttcttggttttcagcagggatccttccagaagcagtaaggcccaaattatttagagtgatggaatttggtggagagagcagaatgagcccagagagctggctagccaggcgatatgtctcctttcaaaatggggctcaggatggggcttgggtggaggctgtgtgtgccctgagacctgcattcatgtatctgcatttctcttacaagaattgatgggagaaggtaccttttctgcagagcctgtgatcaaaggagatgtaatacaagcagcttggccagcttggtccctccaacccttttggggaagatcaaaacctgaacccttattctaggacaggaagcagagggaattttttccttggtcttactgattgattttcatttcgaaaagtgttcccccaccttttttttttttaaatgctccgggattttctaactggtcatgtgacagaatttaaacaccaaaactgttctctgaataccagccacaggtctgtattcctggtttgaggttgatcaggaagtggcctgagctgaaagacccagtgatttgacattgctctttccttgcataaaatgcacgataaagaaaaatgtttttttctttatcgtgcagtttatggaaccagcagactaacccgcccccttcccttgtcttctgctatttaatatttaagctgttgacctaaagaaagaaagaaagggtttttagccttgagatgaagttaaaagccactcagagaaaccgttggatcagaagcttttaataccaacagctgtcagtcagcgagccagtcagcacatggtctttctgtcggagctcagtggagaatgcaagtcccctgtggtaaataagcaacatgccgagtctaccaggaagggaaacacgaacacatactcccctggcccagactttaggagatggttttcttagcgcaagcagcatgacttctttgcctggcaaactcctggtcatcttttaccactggaatgtcatgcttgagtgaggtaaccctgctccatccctggccaggtctgggtcccctctcttcgggtctcttttacaattgaccctattatcatgcaaaacccttaagatcagtgccttcaagtacaaatgcttttcattggagagtttggttctaaagcagccactgagaccaatgttatatggaggtggaatattactcaaggacatccccttagttgcctagaagggaagcagtgcattccaggatcaggcagtataaacagtgcttacctctgaacactaggatcacgcttagcatggtaatagtgagatctatgcacaggagggggcatgtgaggactgaaactcagtgtgaggatgggaagtttatgtctcccttctcaagcacgcagtcaggatgtgcatttgctgagtggaattgtggacaaaccattcacactccttaaatggtatatattgaacccatgcatttgcttctctttgtgttcatagctcccagtttaaggttggacacttggtagcctttggtaaatatttactaaatgaatcaatgaatgatcaaacagagggacatgaaatttgctaatacggtatagatttgggggcctccacccccaccccacccccactatgtatgacttcttttttttccttgagatggagtttcactctgtcgcccaggcccgagtgcagtggcatgatctcagctcactgcaacctccgcctcccgggttcaagcgattctcttgcttcagcctcccgagtagctgggaccacaggcgtatgcaccaccaccacgtccagctaacttttttgtatttttagtagagacagggtttcaccatgttggccaggctggtctcgaactcctgacctcaggtcatctgcccatctcggccttccaaagtgctgagattacaggtgtgagctaccgcgcccagccatgacttcttaatcccactcggatttcactgaatatgtgcgataagtataacctcatcaagttttccttgcaattaggtatcacctggtgtcccaaagagatgtaatatcaccttgttctttaagaagttggttgggctgctctattaatgcccagtgagtaagggaatgacagatgggacagcagccaccatgcaagccaggcaggcgccatccactgtaaacagagaggagaatggtgaggacttgggaaggagccatgtgctccagccattcagattccagtcctctctgtcagctcctcttaatctccatgttactcagatgctttgaggctggtggataacaaagtatccctccttccccttttttaacagcgggcagtaagtggtctgggtttcacttacatcaggtgcccaggagtcttcctgtgtgaagtcagcttgtttggagagtgaagagagaaacttggcaccgggaccctagaatcccctctttctggtttgctttttcactccatcagctgaggtaccacaggggatgccagagacctgaggcttcttggtagaagcagtgccagtttgggatcagaacgtccaatcgctgactggttctcttgctctgaggctggggctccccggagggatgtacctcgcactgactggctggggcccttcatcctttgcattttcttgcatgcagtagtcttccatagggagttctacctctcaggtatttgtaattattttatgccattatataccctgaaagtggctgtgggttataaattccaagttgtgatttataagccttaatagttactaaggcaatgcattgatacattgttcatacgctcataattagttcatgtgttttgctgggttgtgcatagaaatttcggttccaagtattttttgaagtagaagtgtgtttgtaatatcctacttaccgatagtagtgtagcatcctgatagtacatcacagttgctacactcacttctgtgggtccacaccccgtgccaggcaccgtgttacatgcatttcttctgctgtccttttcatcctcacactgagatgcttgcagaaacatctcacaaagcaggcaactgaagggatccagtttcagaccaaggtctggcctgactggaaagctttatcaccatagcatcatacatacagtcacattaatgatcaaaataatgataataagaatcgtgatcgtatctaacactgttataaggttttcctatggattaaccttttggatctttgcaaaaccttgtgagataggtacacgtattatcttcattttgtaatgaggattccgaggtcctgagagttagagaaattttctccctgtcacatagcttgaaagtggcaacactggacatcaaaaatgggcattctgctgggtgcaatggcttacgcctgtaatccagcattttgggaggctgaggtgggtggatcacctgagattgggagttcaagaccagactggccaacatggggaaacaccgtctctacttaaaaaaatacaaaaattagccagatgtggtgggcaggcctgtgttcccagctacttgggaggctgaagcaggagaatcgcttgaacctgggaggtggaaggttgcagtgagccgagatcgcgtcactgcgctccaccctgggcaacagagtgagattctgtctcaaaaaaaaaaaaaaaaaaaggtggaggggagcattctgacttcagagcctttttctaatattaaattgttttaaaataaaacttattgatttattcagcacagattatgtgaatcactacaatcaaattattatgaaatgtctattttctagtattaaatgaggcttaagtgatttttcacaatctgcattttctggaaagctttgataattatatttcagttctaatggtgacatttctttttttttacatcattggaattatttgtttggattacgcatttttttgtatgcttactctatgccaggccccatgctgcatattttcatatattatctcatttcatctttttttttaagctgattcttttagacctgaggcagctgagcatcacggaaactagtcagtgtctatcctaaaaacagctggacccctgctggcgagctcacctgtattctaggagcatggggtctgattcccttcctcagtgaatcaggaaagctttctggggaaaggagttgtgtgggttctccaattcttgttcctttagaagtaaaaagcctttccgtcccatatagggacacagaaaggaggtgatgggggtggtgctgagcctgcccgcctgctctgcgtcacctggaaggagggtgcagaaggagcagggggcttgtctccctctttgctccctttggcgtcactctccacgcccagtaacgaagccccacccctggctgggccttttctcaccatcttccttctccagggctacctcctgagggctcactccttaaaggcaggatgcagtggcttctccttgagtgagctcagaggtcaggagcttcctaagctcctgtatcaagagacagaggacatctgaagccagaatgcccttcccaaagctgccctagctcctgtgtttcaggaagaagccgggcagatgcctctttgttccagcagccaaactccagcatgtcacaaatcatacattacaggaaaagggagccctttgctgctgggcagcggggcccaagatcctcacagtcttttagggatgcttagaattggcccttggttggtttgtagcatttatacaatatcaacccttaaactgatggcccttgaacaagtgcatcattctctgtccttgatttcattcacagtagacagttttaggtagatccctgctgtgagcagacacatacatgcggtctgacaattcagatcccttcgccttcccctcccctatttttatggctgctaacaaatcggctggacctttctctaaaggcctctctgggcgggtgatatttgagtagatttgaaagaagtgtgagatcaaattatataactatttggagcaagaatgtttcaggcagagggactaggaagtgcaaaggccctggggttgaaatatgcttgatgtggtcggggagtggaaagaccagtgtgtctctagcagagagggtgagagggaggcaggggaagatgaaagcagagaggtgggtggaagaccagacccggcaggcccctgtgagccacagggaggcagagttggtcccttttaaatattggggctggcaaatctgactagtccatttccctagtactcctgcttacctctgcatttttgcctttgattgttccctttcttgagtgtgtcctgcgcttccccttggtctcccttagttgtgcaatggaaagtagtagcagagcacaaaaatccacattggaagcttagaggattgtatctttttctcaccagctaactcttactaattagaaattgacaacagcgcttgtctctcatgcttctcttttaattgagatttccttcaagtcctccttttaggcaagagctgcctcctatgagcccctggcccgctgcacctaccttgggtctgggtggctcctgtttgtgtccacatcagcgtgagttgtgtgaagtcctcagcagtgctccatgcctagaaggccccagtgagcattgacttggacctggtgattttcctctttacgctttgcccttccaaagagagatggaagattcagcctcagcgtcagtgttgtttctacggtgtgaccatatttgatgtgcttactgattcctaagtcacctactggcacacagcacagatgcatccaatgtccttatctctcaggctttgctttcaagacttcacactgactacatcaatctgaataatcgagctcaactccagacaataattcaggggtacgatgtgatggccctctgttgattctctttaaaagttgtgaatgtgagtaatcatgggtatttaatgagctctgcaagatggcaggtgctgacaagtgccttatatattctgtttctagtcttgcaatttgtatattatcattcagaaccccaggctcaggaggttaaaaattctgcttacagctgaagttgcagttgcgtgggagagggagcaggagtttattctcccctctttgtttctgcctgtgtctgtatattggccaagcccatttccagtgggaaatccttagtggcttttatggtgttttgtgggagggcacaggggactgacgtgtgaatgccaggtgtcattatcactgtcaagtgtctaattcagtgctgggtcatagacaggtttagaagtgccttagaattcagagttaatccagagtgggccacaggttgatggcattttgctttattcttcaatgctttccttttctctttagaatattgtcatcccttttaccccttcccccttcctcggccattttccccagagggcagaatggcttgagctatttcctgcctgagttttgatgtcgagacccctgcctgcccaattcctgcaacaatgaccctaaagcactaatttcaggcccctctttgcttgcctgcctgcctgcatgagacattgcggccgctaaccctgcacccttgaggcaccccctccattcagtgacatggtactgcctgtgtgcacaggagccctgcagcagctgacccaaacaatgctcattttcattgtggcatcttggcatggcctggcagctttggccttttagaacccagctggtgccagggttgctggcctgccccgcagaggtgattggccacttcgtagtaataaacagatttcaatcctgggaacttctgaggcctgctgttctctccctgtcttttatgtgtctttttgatgaaagatattcgaggtagccacatggtttaataaaaccaggctggatgcaactacctaggtttaaaatatcattctgctaggctagctgtgtgcccttggacaaattacttaacctctctgaacctctccttctgtttctccaaattgaacttagtaatacctacactacagtttgtgccaggatttaataagatagtgtttgtgaaaagcaccttgttcaggtcttacacactgtatgtgctgagtacataattagttttctcaggcagagtcccaaacagaaggagaagccaaataaaccccatgatgtgctgctttgttctgtgtagtcatctgtgtttggcagatttgagattattttaaaccaaagtaaaagagctttaattatgctcttgtttgtggtttggttggttgcattattaaccgattttggaatactccccgccctctcactgttgcaaagtgaagggctggctgggagtcaggagctggaagtcaatactttctttgcagaacttccaactccctctgtctcagagatggggttggcagtgtcatctgaatggggtgtgggttcagagactggcccgtcgaatcagtatgggctgccggctctcttattacatcctgagcatgtgtgtcttgggcccttacagatatacttgctgttgccctttgctcttcattcacttaatttcagtcatgcaatccagttatacaaatgacatatgcataactatttgattttaacaagcagttagctaaagtgtttagtgtgactctagaattaaactccttggattccagtcccttataccaggttcagaatagtcctaggcatatgaaatctcaattttttttcctacaaagtggcttagtgatagcacttatcttgtaggagattagcaggattaacctgtaaaagtgcttaacatactacctgctatgtaataaatgtttaattaaaattacttgtattaatgttagcagtagctggctgggtacagtggctcatacctgtaatcttagtgctttggaagacagagatggaaagatcatttgaggccagtagttagataccagcttgggcaacatagtgagaccccatctctacaaaaaaacaaaacaaaacaaaacaaaaaaaacaacaccaattagctgggcaatgtggcacacacctgtagctctagctgctcaggaggctggggtgggcggatcgcttgagcccaggagcataaggtttcggggagctgtgatcatgctattgcagtccagcctgggtaacaagagtgagactgtctctaaaaaaaaaaaagaaaagaaaaaccaaaaaaaaaaaacctacaattattactagctaacatatagctaacatttgtgtacttgttattacagaataaatatattccagctaagtggacgtggatggttttctgcataaactcttattgttccttgactgatgtcataacactggagatgcatgctccttagatgaatgtaagttctaaaattgttgccaggaaaggactgtgggtggtcctgctggacctggagtgcatttgcaacactttatgggcttcatagcacctgtaggcctctgctatctcccctaaggctgttactcatcactcagcacttatcctagcccttcaatttccctgggtctctggtccagagctcacactgcctcttcttacatcccaggggtatcttgacctttggtagtgggcagtaagatgtgtacattagtctgaggctctgtgccttataaaacactgtgcttgcttgttctatgaattgactgatctggaagctctgtaaggtaggctcattgcaaatgcaattgctgttcgcttagtgtcatatatagcataattattgcacctagaatatgcttgtattgtctgcataactgtagggtggatctggtcttgctctcttataagaaaagagacaggccttgttctctacatgttcctttaggcagtttgcccaggcaaatcaaccaggccattaaggtgaaagtatgatagctgaattttgctctttttccataggttgtttgaatgatttcattttgcatcattcataactgttgtcattctgtgatgtctagttcataaataccattcgccctgagcgattttctgttacatttaagactaacctactttaagggaaagatagtctttcctagtctagtccgcgtatcctagactgagttatgcagtctgggaagcttgcagcattaatttcttgctagaaacaaaatttgtttacatgtccaatattctgcatatagttgtgtattttactcatttatgactataaatatagaggcatatcagcatgtatattgtgtaaatatgtacacatttaacatgtggaatatagtaggactgagtttgtgttttgccttgtgggcactctcagtagttatttcccctcaatattttattattgaaaaaattaagcataaaacttgaattatatagttaatacacgtatacccactgtcatgattctgcaattaacattttgctatatttgctgtataattgttcatctctccatcaccatactcatccattttcatcttcttgctgtggtggtggttgtatttttaagtaagttgcctggtccctaatcatgactatgtgctcagcttgcaggaaacatatattatatcctgggtcttcctgagcctttcctgaacctctctcttacagagaccttgatacctactcatgactgccagagccctcccagtggcctcacccagagctctatcccctatgcctggcattgacaattctgattcttactgtgcatttcaaagcaaggatgttcgagatgttgtatctatcattttacttcctcccatgaagagacttaactggaattctgagaaaatgctttctgatccccatcccttagcacaagccaaataaaggctctttgtcttttaaggctctgataaataccaactcttaaaggcaggttgatttagcctctggttattttccccagagttttctggtctgggcagcctccctcaccttccagccagccaatccaggttgaccctggaggagaaggagctctctgctggtgtgactcactgatgcctcactactgccctggccagactgcgaggctcagaagaaaggtagacattgctgggtggggactgcccattcatttttaagtaaaggctttctcccttatgataatatcacaataattgccacgtaatgtgtgcattctgtcagaaaataatggtgagaaagttaaaacttggcccttcatgcaattacagagagaaaccgagtcaaatactattttatttaactcattaatgagggaaccagtgagttggtaaagccagctcaaagaagcttttgaggaacttggtatttattggcattttggaaaaaaaaaaaaaaagagtgatagaacagaaccatttttaggtaagtgtgggggaaattgtgatggaccattcaaatcagccacaggtaccgtagcttcaggaatattgccagcagaaagagcccagctgtcagctccatttaggactaccttggctgaagacagccaccttgtctgaagtcaggctttcttccagggcagcctgcacccaatgtctgatccatgagcagataaaaagaccaattctcttaccactgcttgaatctcttgaaggtcacttatcctgtattcagaacctcccatagggtcagctaagccttctgttgcaactgcatcccatccccaattctcactctacccagacctgcttcttttcctccctcttacgtaggggttctaggttagcccctagagtacccttgcataaacttgaggctcactagtgttaattccagggtcagcttcatgggaaattcaatctctacatatacaaaattagtgaatgtcttacagggtaatgtttctttgactttggggtttatcttttctactgtacagcaatctgtaagttaacacgcagcttcacagtgttcgtgcccttaatatatagtaaataggaaaatcaaacccaggtatattcctctgcatcagggtttgggaaacttaccacgtaaagagctgtatagtaaatatttcaggctttgcaggccatactgtctctgttgctctctcacaactcaactctgctatagccgtgatggctacacaaatgggcatggctgtgttccagagacactctacttaacacagacaggtggtgaatgggatttggccttgggccatagtatgtggacccctgtcctagataaataagtaatcctgggttggtctgttaaacaatgttccagtatgacattgaaaggacaggctgccccctccccccagctttgcccttttgacacttgtagaatatgatgtgtaatctccccaacagcctacaaagtgctgatattaccactttgcaaatgaggaaacaggctcaggaaaggtctgtctttactacttaagaagatgatggttcttgaattgaacctggtagatctaaccctgaggcccactctgtccccactcgtatcgtcctaccttcctcattcatgggatgcattggagcagtgtttttcattactatttggagaaaagcgctaacaaacagagctggctgcagattcatagaagaaagaggtacgtgaagagtccctgcccaggccatgtaccctggaattttcccagaatgggcagatttacctgtgaacaaggtaactggaatggaggtaggacttatcctctggctccagaggaatttcccagcctggatagtattttcctgacctgcatttgtgacatgagtaggaggtaagaacagcttattgtccataaaggcatcctggcatggagtggagctcttatctcagctgtgccacacactgactgtgccaagcaagctccttggtcagcctgagactcggttatcacagctaagaaatgtggaggatcttccgtcttactcagctctctttataaatgtcctttaacacggggcctagattccagttctgattccatatctcaccagctgcgtgactactccccagtaagtttctgaaatctctctgtgctgaaatttccttgtacgtaaaatggggataataatagtattcctttaacatagctaatgtcacaataaaatgaattaatatctgttaagctgttagaacaataatctggtgcatagcaggtgctatgacaatgttttgttactgttatttttagcacttagtatgatacttggctagtaataggtgctgaataaggattcttcaatgcataaatgagccacataacaaataagccttagaataatttctagaactcaaatagagctttctgcattatgggaagatgccttatctctgctcttctgcaaggtaggcactaactagccacatgtagctgatgaatacttgacatgtgggtagtatgattaaagagctgcattttacattttatttcattttaattaatttaaacttagccacatgtggccagtggctgtcctgttggacagccctgttccagtgggctcagaggttgagattcacttggtctgtgtcatagttggtttggactgctataacacgataccataaactgggtggcttagaaacaacaaacatttatttctcatagttatgaaggctggaaagtccaagatcaaagtactggctgatctggtatctggtaagggcctgctttctggttgatagatggcaccttctcattgtgtcctcaccaggccaaagggtgtggcaactctttggggcctctgttataagggcactaatcccattcatgagggcctcaccctcatgacttaatcacctcccaaaggcttcacctcctaatactatcacattggtggttaggtttcaatatatgaacatttttaaaaggacacaaacattcagaccgtacagtcttttatcagcatttctcaaacatccgtgggtggttaacatgcagccagaattgagaacagagttagaacttttaggccggtactttttcttctatttatccatctatccatctattcgacaaatgtttgttaagttcctgttatacatcagttactcttctaggaactagcaatcagcaaagataaagtcttggctttcaaagaacttgtacgcaggtagggaacagatgattgaaaagcacacagtgaacaggacacttctggacaaggtacttgaatgccaggaggaccaaaagtgtgttgccatagcgactggattggaagcgaaggtggtgctgatcaaaggaagcctttctcaggaggggacgtttgagctaagacctgcctggggagaaatcagccttgtcatgatctgggataagagtgttccaggcagatgcagtagcacattgtctcaagttgaggatgggtttgatctgtttgcagaacagcaaggcaactggtgtggtttgaatggtaaacatatgggatggtggtaggaaatgaggttggagaggagggcaggggtggggggttttatagcatcttgcaggccaggagggtccggagttaggattttattccaggcccatggggagccattggaaaatactgagtaacttgccatgatgtgactttggtactcaaaatatctaattgccatgtagtgtgcatggacaatggggagaggcatggcaggtgtggtggtatctcaggtgaggggttgatggtcgccaggtcataggtggtagcagtggagacagaggagtggacagattggaatctgccaaggtagggccaagtgatgggtggattagatgtctgaaggcagcagaggcaatggaggagggtccccagcactgtgttgccatggagtggacagtggggctgaagacccgtgtagcccgaggcagcatttttgacttgaatgttcatatgtaccactggggatcttggtaaaatgtagaatttgactctgtgggtctggggcagggtctgagatttttgaatttctaaaaggctctctggtgatgtcagctactcctgctggagccccacttgactgagcaagggcttactcaccctcaccctgcacatgcttctgccacacagaggcacagaacagtgaaacccccggagggacagggagtgcgtagaagcaggttgtagctcgcctgcaagaactctcaagaatcaaggttgagtctgttgttcctaatccatacctgcatcctggacttgtggctgtgagtctccagagactcaaggcatttgctttgtgaggacacagaagtccctgcttttttgtttgtcctttaggaacagagttcctgggcaattatttcacagcctgtagcagtgtaggtacatctcttcaagtccaatctttagaactgctttgaggggatgtattttacatgaaaaagaagcctttaaagcaaaatgagctgtgggcgtgaaggcagtgtgactccctgtgtgtaagaaccctgtgctagtaacacagtgcactttcttggtgtctgggagaaatgagactttatcactagagatattaataatatgatgatcagtttcagcagaaaggaagtttaactccaaagtggttcctctagctgtgggttcatttcttcatgaaacaatgaaccaggaaaggaagtgtcaagtagtttaatgtgatgcatatttgttgctataccaggccataggatttagggctgttttaaaatgagtgtatttcttgtatacaaggggctagctcaaccatagtggtcatccagggcttgcatacaatgttttattgacgcaggacttcatatggaagctttttgtaaatgaaactaacatttgattactgggagaaaattactgtgactagccatctggtttcccagccaatactgttgattcatagtgcttctagtagttcttaataatctgtctcatttcatatgatatgagatattgaagctattttcttgacttcctccagcctaaacacttagggttattgcaccaagcgtgcactctagctttcttctatctaatcttttgagttgccaagtgccatggcatttatcgttacaggttattaaattatgtggtgttttccatttttattatgttcttcacttctaataaatgcaaatcttctcttcagagcccacacagatttttcaaaactaggcagtgtcaaggacaatgaactgtgtagacccagccttactcaaaactaccagtgtcctttcttgttttccagtaggaagctattcagttaaaagcactcaacctgtttgtcattttgctcctctaaagaagcctaaatccttcagttctcaatgtttgtgtctcctatttgtttctcttccattttcgcaattacagctaactccagagataaaacaggcatggtttaagagtccttaatgaaatatctgcagttcataatatggttgtagaattaaagcagggccttttcctgtgttggaagaaatgctcccggcataagcatatgcacctctctatcctctaactctggaaaccagcatgttacatcctggatgaggactcagagtgatggccccatcacaaagctgaaaaaacttttctttatctgccaaaaaaataaaagtcagatccatggtgcagtcacgattgcttctctgaggtaggactccaggtagaaatgacacttggaggttgataggtttggttgtgtccccatccaaatctcatcttgaattgtagctccataatccccagatgttgtgggagggacccagtgggaggtaattgactcatgggggtgggttttcccgtgctgttctcgtgatagtgaataagtctcatgagatctgatggttttataaagggcaaatcttctgtgcacactgtcttgcctgctgccatgtaagacatgcctttgcttctctgccaccttccaccatgattgtgaggcctccccagccatgtggaactgtgagtccattaaacctctttttctttacgaattacccagtctcaggtatgtctttattagcagtgtgagaacagactaatacagaggtgctttttctggagggacactctgattagtgtgaataaaggtgagtcttatgtaagatgtttatcatcaggacatgctgtatcttgtaagaaaataatccaaatggtacttagaatatgtctcattgataccagccttgatgctgaggagaggtattgtgggcttttaggagccagacagtcctgggtgaaacctgtctctgccccttgtagctctgtgattttaggaacgatatgtcacttttgtgatctttagttgcctctagaaaatggagatgataatgccattttagcagctggaaagttgtgagaaatcaaagtaaccgtaagataagttcctaccacactatttgccattgtctatacaattgttgcttttaaaataaagacaggctggatgcggtggtgcacgcctgtaatcccagtactttgagaggctgaggtgggcagatcaggagttcaagaccagcctggccaacatggtggccagtttagtagagatggggatctctactaaaaattagctgggcatggtggcgggcacctataatcccagctactcaggaggctgaggcacgagaattgcttgaacccaggaggcagaggttgcagtgagccaagattgtgccactgcactccagcctgggcaatggagcgagactctgtctaaaaacaaacaaacaaacaaacccccaaaacttataaagctggatgttccaactaatgtcctatcctggtttttaaatttctttggatcaaaataaaaaactcaacaggcttcttctgatttctgacagtttcttttgtgctggtgcctttgactatctcaaaacgtggctgcaggtgttttccctagctgatgaaatgctgggactgtcctcttgataaagttagtctccctggacagtggcggcagagtggattggtgtgctcccatgtgctaggctgagtctaccctgcagcgtgggctccagcagcagtgtgttaagggcagtgttggaacagactgttctctctattttctgacctgctcaggcatcctgcaatggatgacatgtgagcatgaggatgggtgcgggaggcgaaaggcagctgaaactgcagggcagagccaggcgaagttgagaacaagaaggaatcgctgctctacacacacggggtttttaaattagaaagatatcatgagatgcagaaagcaggtgctcatggtttgtttctgttgttcttggcttgcgttaaggtgcctctctcgacacggttttctaagtgtgaagttggagctagtgtgacccagttaacattatagggctctgtcatttctggggatgcatctggtgaccatccatcatgtaccaaacacctgcctaagaacagagccgtgtgcctgtgtcactggtgcacacagcaacatgctctaagcttgtcgatccccagttaggcaataaccactttctcactgaggtaaagaaggccttgtcctgtaactggagagacaatgcctctattctagacgcttgagatcacagtctttccagagagtgcatttccttttacatttgctaatatttctaatactgtattagacttgcttgtctatgcaatttccccaaacaatgtgtctctcttggctttcagcttttattagacacaaacatctcatttctgtaattgttctcctgtcaggcctggctccattattatctggcctccagagcaatttgagtctcttctggagggctgagaaggctgcactcccttcctcatttccagtggatctgggaaaactcagctaaaggaatttaacatttcgatccgcaagatactaacatcatcctcagtgggttgacatcttcttcttcccttaactgtgagactccagagcatgcattttcgatggagttgatatcacttctagtggagggaaaattacttctgggtgggggagggaggcaaaaacttactctttttatgtataaagcaaaatatacatattatgaatatatagagagatttacattttattggtagtattaaaatttcatggggggacaattaggaagaaatgtctaaaaaggttcttggaggtgataatgaagagaggttaaaaaactgctgcgaattttattcttcgtggctcctatcacccagtcacaacaaataatgcgtaaaatgaaactctttagttctgtctttgggatgaagagtggccaagtgccatatgggaaggagggaagggctggtgtgttcccaagtgaagagcaattcaaaactccttggagagagtcatcaatgaggtttaaacagcattggaatctcccagagggtttcaacataccaactcctgggttctgcaaatgtaccccagaaacattctggaactctggacagcacttgagtgattcctaaatatccaggccaacacaatgtctgtaacctctgatgtagaacagggagagagagtgacttagaagggaagctagttcagtgtgggggggatggggctattttgcaggcgtttccctaactagctcccttcacctctgtgctttggtaaactagacagtacctggttagttcaccaactgtccccctgccttttccactttgatgcatttgcttattgagtggtctctacttggagttccctttcttttatcataacctaacaacattctatttactctataagatgtatgtagttccaacgtgactcctcttgcaggaagctttttgtgaacctctcccagttctgccctattttttcattgcatttaccacattccaccttacattttgatcatttctgtgcattgtcttttttccattttattggggtataatttatataccataaaatccgtccatgctaagtatacaagtcaatgatttttaacaaattcataaagttatgcagtcatcaccacactcagttttaaaacattccatccttccagaaagttgctgatgcccagttgtggtaagttcctgccccatctccatcttccagacaacctactttctttctccatagctttccattttctggacatttcatacaaacagaatcatgcaatatatatagtgtttcacatttggcttctttcaattagcatatctttttgaggttaatctacatcatagcatgtattaataatagtttgttccatttcattgccactactattcattggtattggaatttagtagatactgtatttatcagattgtgttggtgttatatttttggttatatcacattttgtttctctgttaaccattcatggatgtttgagttgttcccaatgtgatgttattatgaataattctatttgctgtcaatataaatgtgtgtttttaattctcttaggtagatacctgggagtagaattactgggtcatgtggtaaatttatgcttaactttttaagaagctgttcaactgcttttcaaagtggctataaccattttatcttttatgttcccactagcagtatctgagtgttccagtttcctcagatggacgtgaatactttgtattgtctgttcgtttgtttgtttttgttttttgagatggagtcttgctctgtcacacaggctggagtgcagtggtgtgatctcagctcactgcaacctccacttcctgggttcaagcgattctcctgcctcagcctccccagtagctgggattacaggtgcatgccactgtgcccggctaatttttgtattttcagtagagacgggtttcaccatgttggccaggcttgtctcaaactgctgacctcaggtgatccgcccgccttggcctcccaaagtgctgggattacaggtgtgagccaccgtgcctggcctgtttgtatttttcattatacacattctactgggtgggtagtggtatctcattgtgacattttatttgcatttccctaaagactaataatgctaagcatcttttcaaatgcttattagacatttgtatatcttccttggtgaaatatctcctcaaattacttgcctattttaaattgagttgtttgtcattttactgttgatttgtaaggttggtaggtagttttgttcaaatcatctttatccttactgattttctgtctcattgttttatcaattattgagagggatattaacttctccaaatattattgttgtattgtttatttcgcctttcattttgtcgatttttacttcatgtattatggggctctattcttaggttgatgtagttgcatttacacctgccattttgtgatttgttttatgtctcatcttttttttgttcctttgtttcttctttattgtactcttttgtgttaatattttctcatgtttcatttcaattccttttcctcatgttttgaattattttcttagtgattgcatgtatgatatatgtcttaagttatcacagtgtacttcagatcagtactaaaattctctagaacatggaaactttcctccagtatagctccatttcatccccctcctttgtagttttgttgtcaaacgtattacatctatatcttataaatgaagtgttatggttctatgcaatctaatgccttttaaagaagttaagagaagaagaaaaatacatttatatagctttttgtatttacttacatatttaacttttctgatgttctttattaatgtatatcttagtgtatatttgagttactatatggtatcgtttcctttccatctgaaggaattcctttattatttttgcaaggaagatttgctagcagtgaatcccccaagtctctgtttatctaggaatacctttattttgccttcattttcaaatgaaagctttgccggatgtagaattcttggttgacggtttgttttctttcagaactttaaatacattgtttctaatgaaaagtcagctcttaatcttattgaggaccctgggtatgtgatgagttgccatcttttcttgctgctttcacaattttctgtgggtctttgccttttaacaaactacaatgtgtctaggcggggatctttttgtgtttgttcttctttggggttctttgagcttgttggacctgtagattcttgtatttcactacattttggatgtttgggccattatttcttcaatttttttttctgcctctttctcttttttctttatgggactctattgcatgtatattggtatgctcggtggtgtcctaaaggtctctgaggctctgttcatttttcttctctgtggttcagattgcataattcttagtgattattttccaagtttactgatttactgattctttcttctgacatctcatatctgatatcaagctccttttgtgaattttttgtttcatttattatacttttcaactctagaatttccatttggttcctttttttaagaaaaatattttctgtatctctttttttaagagacaagagtctcactcactgtgtcacccaggctgtagtgcagtgacatgatcatagttcactgaaacctcaaactcctaggctcaagtgattctcccaccccagcctcctgagcagctagggctctctccagtgtgtgctcatggctttctggtcaaccagagataatggggagcgcttaaggatccctatggctgatccctgtcttccgtttaaaattctgtttagtttgccagtcttttgcttgccccaaccagcactactggttgcagcctcagggtagctgagggggatttccttgtttatttgcaatcaatattgctttccctgccactgttctgccaacctacatgggagtaggagggagggcaagaaccagattcccactgatctatccagaagttttaaatgaattagtgctcctcagtttgttgtatgttttgtccagagtcttgaaatggttgtttttgacagttttatcattgtttttgagaggatttgccaggcttctcacactgccattctagccccactgcctttttccttctagagaggaaaactcatggggcagataaagtgtggactctggcaccggattgcctgggcttgaatcctgaccctgccatttgcaagctgcaagaccttcggcaaattactagaccttggacaaatgacttaacttttgtgcttctgtatcttcatctgcaaattcgaaataataatagtacttacgtaacaaggttgttgtaagaatgaaatggattcatctacatagtgatagcagcggtgcttgttactgcaaatgcaatatgttagctcttttacttggtgcagcaagggcagggactgtatcttacttggcactttaaaccttgccccaccatccttggtctggtggctcgcacgtagtcagctcattggattctcagatcatctttcttaagtgatgcttgacatacggaggaaatgaggacagctctcagagtaactgaagatgcgaggaggagggactgcaggggacctgaggaacagatggcctggtgcctcgttgaggccaaaggttggtcagtgtgttttccctcctagctctaggaactgcccaaattgcctggtgctgctcagaagccattgaatttgagatgaggtctgtacacttgcatttccaatccaagaagttaattagcacaattgccaccatttcagaagctctcttgtttcgggcacttcaggaacggacaggacagtgtggcgaggatgctgatttttaggtatttttgcaaaagggagtggttgtgggggagctgtgggagagcagggggtcttatggtgtgtactcaccaacctcagctgtttctcacccacacagagccatcgagcaaatgagagattggtgccttttcctccagtggacacagctagggtgaacaaagtatgggaggcctttgtggagggaggcatatgtcctacgcagctgtatgcagtgatcctggcttagccaccacgtgtccagctctgtgctcaggagcagggcagcatggccataagatggtagccatagatgtgaaatctgcttacatgggtttgactgaggtgtaccgagcaaatggggactttcttatgattcttaacagaaggactgaaggaggatggcagtgacaagaaaggtgattgttgaattgaagttgttgttgtacatggatgaggattgggtgtgcttgtggagagggcaggggtggagccggtggagagggtgagagtgaagaggaggaaacaggacacagtgatggagaaaggtcttcaggagatgggaaggagtgggtcgggtagagggatctgtgttcagcgggagggagggccacgcttttcctgggtggaggtgaggtgccccacagcacatgccctcacttccccttcctctgaagagggtcccacgtttagcttcagcaggaagaggcactgctgttatatcatgcacggatgttcacctctctactcctgtggtcaattacaggtacaccttttggtatttatttgggtacttatcagtatagcatttttagcaccttgaccagatactgtgcatccaacaagtaggaaactgttttactcctgggggagcgagaccaagtagtgatatgtctactcttctcctaacgctgggggagtagaattaaactgggcgtcaggtgtgccatttgcaggtgcgtgatacattgcaaattgcttcattcctctgggcttccggttcctcctagtagactgcaaggaatggactagatcatatcaacatccaattagcagttaatatccattggtcctgtgatcagtcactctgtatctcagatgaagccagtgagggtgttttgtgcctgagatacactaaaataggagtagaaggacacacaggtcaatcagagcagcaagctggcagaggcaggtcggggaaggtgagttcttatggttcgtggttgttttcttcactgctctgaaactaaaattggactttgttattattctggaagctttttaatgctgcatataggaggatgctattttgttctgacctgtgtttattccatacctgcatgcacaagctttggtaatcatattattttattagcgtatttatggaggttcatttccaagagaggatataattaggtggaaattggttatcttgatagttacaatttaaccctacctctctgatggtttgctcttgaggaatttacatacaatgattttgtaccctgacctggtagagatgggttgtaagcagtacagtcctatggaattacaagtagaatttgaaggccaagagaaaaagaaatgagatgcttacgctcatccctaacattccacatcattgctctcacatggctgcaggcttgggtctgagattcctgggaaccaaagcaaacagggaaatacagctataatcacattatttatagactttggttgggtgtagctaaggtgagagaaacagtagaactagttcccaggagaagcagagcttttgctagaccttaattttaaaaatatctcatatctgccttaaaccaatgtttctgatagtatatatagctatcccttgggatctgtgggatatccagagccctctgcagataccaaaatctgaagaagctcaagtcagtcaaagaacatagtatagcattggactttaacttatgcaatcctctcatacactttaaatcttctctagatttcttgtgatacctaatgcagtataaatggttcttatactattggtttttaatttagttattttgattgctgtgttgttattttttttatttttttccggatattttggatccatggtcgatcgaatccctggatggacctgtggaaatggatggcagcctgtatatatgttttcaagggatgcttagttttgttttttttttttaagttacgtggtcaagggagtttcaggaaatgctacataatatatattttgatggatttttgacagtaaatgttaccatttggaaaacttataaaagtcttgtaaagaaaactatttctctttgttcaacccagagttttaaaaatttcatatgacctcagaactctttttcctccttatataacttttaacaataagtaaacttatcgttactttttagggcaagtttggtcaccaatttgcttgtggctgcccctgcttagctgataggcccattagccttcacccccaagtcgggccaccttgctgacgcaggggcacagtgcttggtcacttgggtgctatgggaccagtggggttgggcgtcaatcctggctctgcaccttagctgcgtggcatcaatgggatagttatcttctctgggctcaggttcctcatctgtagaatgggatagtaatatttctgcctcatggaatcatagtggagagtaagtgtgtcagaatacgtaaagcgctccatactggacttggcataagtaataacaaatgttcaatatgattgtatttaatgatacccccattccagagcttgctagacacttgtctcctcagttactaggggctaactaactatgtgctatttctttgggtactgattgtgtgtttttctttattccggtagagagaaactttattcatcctttatgataattccctgttttcatagttgttgtctccatgatactgtgagctggttgagggcagagaccaggtcttatcgaactttgcctatccagcccctggcatggtacagctttgcaataaaggattttcaatgcatttgacaggaagccggggccctagggcatataaagaagcccaattcagtgaaaacagttctgcatatagcagcgtgtgtgtgtgcataaatcaaatgagggccttagactaagatctctgtcttgagaatatgtctggtcctctgtacatttttgttgaatgctgaggaaatcattgaaatcattattcttaaaatttctctaataaaagagccctggcaccacagaagttggtgtgttaaaggtgtgaaacacaaactattaataatagtctgatgcaaaaatatctggaaatgaattgaaagctccgatcctgagtggtagaaaattctattagttgactgtacccaggagggatggagagtctttatttttctatgatggaccaaagagctacagagaaaaatcaatgatgagatttatgagtaggaagcaattaaattgagtgtttttttttttttaaagagacaatcatgaaatgttacataccctcagaatgaatcaatgaacataaaaattcactaaatgtaaggaataataacatttgcctcagttttactttagggccatttagaggaaagagtggaagaaaagggagatgagagaaactaagaaatggagtatagaggaaacagtagcctgaggaaggtgcaaatagtgaagtagagaaaaatgcaggcgatggcagagacggagtcttaaaggacagaccaaggaggcctttctttttctgttgttttctttgagatggagtctcactctgttgcccaggctggagtgcactggtgcgatctcagctcactgcacctctgccactggggttcaagcaattctcctgcctcagcctcccgagtagctgggattacaggcacccgccaccaagcctggctaatttttgtatttttagtagagatggggtttcaccatgttgtccaggctggtcttgaactgctgacctcaggtgattctcccaccttggcctcccaaagtgctaggattacaggcatgagccactgtgcctggcccaaggaggcctttcttttttttctatttttcttttttgagacagagtctcactctgtcacccaggctggagtgcagtggcatgatcttggctcactgcagcctttgcctcccaggcagattctcctgcctcagcctcctgagtagctgggattacaagcatgtgccaccatgcccagctaattttgttttttacacttttagtagagacggggtttcaccatattggtcaggctggtcttgaactcctgacctcaggtgatccacccgtctcggcctcccaaagtgctgggattacaggcgtgagtcaccgtgcccagctccaatgaagcctttctaaggaaagccaggccgactctcactcgcagactaggtgatcagagagaacgatagtgcccctatgaaagacccaggtgtagagagggcagtacagaggcccagagagagagagccagcagctttcatgatcctgctgcaaggacgaggaaagccaccacgcacaaccccaggcataactgtgacgtgcaggtgtgcagagcctttctctccctcatttggaccctgtgacaaaactgtaaggggggattgttatctccatgttatagaagggaaaggagagttgcaggggtgttaagtgccttgtctcatattacccagttaatatgaaactcaaaatctcacacattttccactgtaatccccacccccacaacttgccccctaaaatgatgatgcttttggtgtagactggagtttagagtctgtgtctatgagattctccatatgattcttactctgctttttaaagaaaaatggttttaaaatggcccccatttatatgtgaacatgatccaagctaaatcattccaccagaaataaaacctcattgactaaatgtctcttttccctagtcagcacatgaggtgggtgttctctttgccaccatagccatgacaagaggctgatcctgtgtcgtcttctgttacttggttctgcagatctaggatcctggaattcacaagtgaatgcattttgtgtgccatttccctagaactgtaaatgactcaccccaaggagctgctgtctagatgagaaacaaaacctcacactattgctgctgctgcttcatcatggggaaatgacttctgggcttaggtgattaagtctctttctaccactttactacaggaagacatgtccttggcacatcagacagaacactgaagttatcttgcaaattactttaatggaattaaaaaaaaaaaaaaaaaacttggccgggcacggtggctcacgcctgtaatcccagcactttgggaggccgaggtgggcggatcaccagaggttaggagttcaagaccagcctggccaacatggtgaaaccccatctctactaaaaatacaaaaattagctgggcgtggtggcgggtgcctgtaatcccagctactcaggaggctgaggcaggagaattgcttgaatctgggagacagaggttgcagtgagccgaggtcgcgccattgcactccagcctgcgcaacagagcgcgactctgtctcaaacaaaacaaaacaaaacaaacaaacaaagaaacccaaaaagcttgcattaaaattgtgcctggaatgacttttctgttacagcaacaggagtgcttcatatacttaccaatggccagtgtttgtattgccaggcacgggaatagtgtgatttcccatgctgaatttatagagatcaggggtttggcattctacatgtggcctatggaccaaatgtggcctgctgcctgtttttgtaaataaagttttattgaaacacagccatttccatttgttcatatattgtccatgcatgctgcttttgtgttatggtggtagagttgagtagctgctatgatgaccatatggcctaaatatctactgactggctttttacagagaaagtatgccagaccctgttcaggaacccctgttgggaaaaccacaggtttttgcaggaccacagcgagattgacatctcctgcactgtttttagcatctgctccctgacatgggccctgctgctgagtgtgcagtttgagggtataggttccccgaagctccccaggaagagcctgctcagttctgtcacatctgccactactcagcagaaggactttaaaatgcaggctctccacactgcactcccgggctcctcccagcctcgtagagcatcctgctctcacccttcacaagcgctccagactgagccaggtgagactctcgcagggacctttcggctccaccttgtttgttccatgcctccaatcagctgccgcctctgttgagctggatctctaaggtggctctgccacaggggcctttccttgctgttacaccagcattagcctgctgaagcctcctctctccccagcactgtggaaacagctgccccggccgtctctcctccctgatacctgcacagcagtgccaggttaatactgcagaagagcggctcctgctcaagaacctcccttcgctccccattgacctctaaatcaaagcctcagtctggccttcaaggttgtttttatctcagacgactactcacagttctctgaagccactccatattcctgcctttccccaggggtggtctaaactctccctctgccagcctccttgacgccactgatctttgctcttggaatgttgtggcagcctctcccctcccacagctattaaaatctaattgatctttgttgcatcccaggtatatattcctccacacacagccaaatgaatgttgttgctccctcaaaccctctgccactctgttaccctgttgcaggctgtaccattgttagattgtttctttctgctgtccccagactgtaaactcctacaaggcagcatgctctcttaatcatggttatgtttcttgcatctatcacagagcaggcacttggctgtgtgggactgaatttgaagtgaagtcacagagcatgcacaccagtgatgtggctagctttttagtgtgcacctactgtgggccagctgctctgatgtatgacttcattaatgtccgcagaagcaagtattgttctctccaccacacaggtgtggaaacaggctcaggaagattgacttgaccaaatgctgtcaaagccagatgggaactcgaggctctcctgctccagacttacactgataggaccaggctgctctggtgtaaacatccatgcatgcacaacctctctgccacctgatacacatgcacacgcctctacctgcatgcatgttagagtcacccagggaactctgaaaatacagatgcccagtcttgcaggtgggaggacacgcacaggtgtttttcaaaagctcaggtgatgccagttcaggccaaggccccgccacccagaccagagtgagaagatggacacacctctgggagagcccctgagttgctgctgcctgcccctaagaataagtgtttttttgttaagtgaatgcctgataaccttgcccctggttggcaccttttgaaggtgaggatgggctcatgaatacttggccgtggcctctgaatgtgtcctgtcctatggcaacatagactgaagctctcccttttgggctaagtgctgatagtttcagttggccttagtgtgacttcagcactttccagaaggtgaggctcccagaaatgcatcccaacatttcccacatgaggagacagtgtctctatgaactggaaatgaggaggcgataatttcaatttgtagataacttaaactctttcatcttttgaatgggggaaggctagttgagaagaggaagctgagtaaagcagaggtactcaaagtggggtcctctgatgagcagcatcagtgtcaccaggtagcttgttagaaacgcatagtctagaccccaccccagacctgcaaaatcaaagactctgggcttggggttcagcagtctcacactctctgggggtaattttactgccaatgaaggttgagaaccttggttctagaatgatggtgagtatgtgcctggtgcctgaatggtcagtggtcctcatctccagctgggtatcagacgcatatctatatctatctatatatatacgtatctatatctatatagatatttagattttttttttgagacggagtcttgctttgtcaccaaggctggagtgcagtggcgcagtcttggctcactgcaacctctgcctcccgggttcaagcagttctcctgcctcagcctccagaggagctgggactacaggcatgtgccaccacgtccagctaatttttgtatttttagtagagatggggtttcaccatgttggccaggatagtctcgatctcttgaccttgtgatccgcctgcctcagcctcccaaagtgctgggattacagtcgtgagccactgcgcccggccgggacatctatatttttaacaattgccccaggacattctgaaatgcaagctgattttttttttttgaataatcattgtagaagcctgatacatactgcatactttacataataacttcatatacacttggttcaggataaggacgcttcctctttccttttcctcttgcagttatggctccttcttctctaattatcaagaccttctccattagtcctgttacccattaagtaaaggcagtcattcccttccacatgctcttcctcaggctgggttgttcactgccacataaaggctacaagtgggttttatggcctcatgcatacttagtctgtcttctcaaaattgtgttttaaatgagtgaaaacattagcctctgatctaattgatccacaaagcatcatttcagaatctttgcatgacttcccagactggcattgcagcccagcagaaggccacaggtcaaggagggaaagaccgtactacttcctgtcacccctgtgcgttgctctgcaaagagcaggtgggagccaggacaagagctgcaggcacgggcgttatctgtctctaaaagaactgattattttttgttttgcccacagctgtctctgtcccaatcacccttatctgtcatcaatgtgcacacctgcatgatattttatgacacagcacacctgctgaaatggagcagttgtcatgtttcagatttgttgtcttgtgtgtatgtcatgaggcatcatggcaaaaatgagatacagcttctgttctctcccttccccctactttgttaccctccagcctcatggtgggtcctaaagctgaagacctaccagactgcttcagccacctctccgggggtgactttctaggggaccccacccagacatgttcttttccacttctgcatccagtcccctttggacctctcaagactcacacaaaggcctgggcgaggctccccaaagccccctacctcccaggtctttaggctgccttcctttttgttgccacattgcatcacctattataaacctctggtaaatcatttattccatcatgtatgtatgtttgtttgtgttgcgaaggaaagtagtaaataaatgaatttgtttttacttgcccagacccttcagacagaacttctttggcagtatttaaaagccatttgaatgatgccaggactagctaaacttcgtttctgaacagcggcaaacacctggtgttttaaaagtaacagtctaatcacataactagggctgagtgatctgcaagctggccttgacttgtctagaaagcacaatagaaataggagttgggatcagaatgccagagatagagggtgtcacagatgtcataaccctgctctgcagagcttgccgaaggccagggctgaaagagagacccccaataatgggtgtcatggccttagccccgcgctgctcactgccattagaatcacctgggagctttgaaagcgtcctagggcccccaggccactccccagaccagttcagtcagaacctcccaggtgggaccaggcctctcaaatttttagtgctccccgagtgcctccaatctgcaggtaggattgagaaccactaggctcaaggagtttgtttaaatatgtgggtttgaaaatgaggctaagaggaatcacctggctatagcatttttttggtttgtttttttagtaacgggaaattgaatagaagcatgctaattagcacaggcgtatgtttatatgtgcatagatacacgtatctggacactgcagaggttgtagatgcatggacgtttacaacagtgtccatatttgtagatttggaggaaggttagatccatatgactctcctttttgacctttccttagtagacacacccggttggtcagcagatccagctcattctccctgaaatagaactctgccctaaaatgcttcttacatcttttcctgttcatttccattgccagtgtgttgacgtggccttttcttctcccctctctcaatatggcccagctgtcttcactgctggccttcttccaccctccattcaccacacctggtgtgacccctacactattaaacctttgctgttctccggtgttcacagataaatgataatgataatggttatagctgacccttccctagcatttacatgtatgtgttgttgactcttgacaccagctctatgaggtagcactcttatcccccttttacagatggggaaactaacgcgcaaagtaacttggtcaaggtcagccagagtcaggatggacccaggtggtctggccctagagcctctgttttgctgcctctctccatgcactcctgccatgtaggaagggagaggctgctctgtgctaacagacttttcatccattatttttaatcttcacatccctcctgctgattagatattatgattcctgttttgtagaatccaggctgggagagtttgagtaacatgactgaggacacagagctaaggaaataataacaggggttcaaaccaggttttcttccctccatgatctgtattgtgtctacctaattgctcgggattgtctaaattcacccctgtggcatttgtggctccttacaatttgtcctcaccccacctttccaactattttcttcctttttttttttttttttttggaagcaaggtctcgctctgttgcccaaactggagtgcagtggtgtgatctcagctcactgcaaccgccgcctccagggttcaagcaattctcctgcctcagccttccctgagtagctgggattataggtatgcaccaccacgcctcgctaaattgtgtatttttagtagagaaggggttttgccatgttggccaggctggtctcgaactcctggcctcaagtgacctgcccacctcggcctcccaaagtgttgggattacaggtgtgagccactgctcccggccccagctattttctcttccatgatgaaatcatgccacctatctttggctcatgctgttccttttgcctgaaatgttcttccctactcagcgaggacatcattcagctgtcagatctcccatgacaaggactcttgtcttgctcacagcaccctgcgtggaatttgcacacagcagcagagggtagccatctcattttcttaccactttaagaagccctgtaagaatgcatctcctcatggcccccttggtgtgaggtctgcatcacacatctcacctccagtccctttgtgttattcttaggtacatgtttaccttcttgctagatggcttcttcaggccagatgtcctctctccatcacttttctcttgtgtctagggcattgcctggcaagcagcagatgttcggtatatgtttaacaaacatagggcagacaagaatacaaaaaaacgggggaaatcataatattcagttggagggtacttggcagggtcatagtgcttagaacagtcaggggtgtatttacctgatggcctctggggaaatgtacactggaaatttccagacggaagcaaagagcaaatgattaccccgctgggctgatttagcttgtgcattttgccacttgggttttgttaagtttgtttttattttgaggtgggggataggctttgctaacctcctgcggaaaatctcctggctcctctgtcttcctggcatggactttatccctagtatatatttgggagtgtgtgcaaaccgcgcacttcaggacttttataggttttcatgggctgtctgtggtggaggtctgtgggggtggggaatgcagtgtttccggaagagggtagaagctttcaggatggaaacaggtgccagaaaaaacattgttgctactgggaaagtgaattcgttaactgaattagggttatgatactaaataaacgtctttctgattcgtcaggttaaaaggcatttacacagctgcctttttgcacctggcaccggaggccaggtgggagggtcccgggggggatgggcagagcgcactgtcaggcgggaaggagaggcttcctgggcatcttcttggattggctctgacctttcttcttgcccccctcaggtgagcgtcctgaccaccctggagcgtaggttcaacctgcagagcgctgacgtgggtgtgatcgctagcagcttcgagatcgggaacctggcgctcatcctcttcgtgagctacttcggggcacgcgggcaccggccgcgcctgatcggctgcggcggcatcgtcatggcgctgggcgcgctgctgtcggcgctgcccgagttcctgacccaccagtacaagtacgaggcgggcgagatccgctggggcgccgagggccgcgacgtctgcgcagccaacggctcgggcggcgacgaggggcccgaccccgacctcatctgccgcaaccggacggctaccaacatgatgtacttgctgctcattggggcccaggtgctcctgggcatcggtgctacccctgtgcagcccctgggcgtctcctacatcgacgaccacgtgcggaggaaggactcctcgctctatataggtaggagctgccccagccgtattagcaagagaccagggtgtgttgaccatggataaaaggtggcctggtggactttgattttgccagagtactggttctcagacttggctgcacacctagtgttcttgaaaaatactcatgcctgggggtgcaacctgggcattgagacgtttttaaaagttcccaggtgattcttgtgagcggccgaatttgagctccacggggctagaccactaacaccgcttcagtgggaaaacatgatcgggaggagttgtatgtttatctcttctttttgagtgcgtatgtggactttgggctttctgatattagccaccaaggtatacttggggtctacacattggaaactccagctttgaagaatcagaatgatgtcctggtcattgtcctgttgcagctcaaaaggagaggtgatggctttgccagcatttggcatcattcgaagttggtgacttccggtaattttttcaataatggaagtatgcatgggaattgggtatgtagagagaaataaggtatttgtgttttgaaaagttatttttcacggtcagagtttctgatgttttatactggaaggatggaaaccacttgtgcgtgggggttaagaatcatctgagtggcaagttgtttattacgtggcgggcagtgttttcagtggctgcggtgggctctgttggatggcagcgtgcaaggtgagggctggccagccccgcatctctatcccttgtttacaaagtataattctgtctcctgccagctgctggatttttctgacatccccagtcactgagtgctaagctttgaaaacattacctctacccagggaagctttatgcctcccaaaagcaatgtgccttgaggtagaaagttaattatattatggagttttaagtgaaaatagaatttgaactggatttgacataaaggttcctatctgccaggcttcaagcttgctgagataggatggtttggaagcaggacacaccgaaatgcagatttttctctgtgtctttctggcccagctttggagtagacgcgtttactgaacacggatgttgcacgcggatgttctggctggctgtgagcaggctctgggcaggaaagatggaaggaatgcgcctctccattcagaggatggagcaccagtgagcctagtcaccagctacctatggaacaaaggggaagagaaaacggctcaggccagagatggttaggggtttccattattacctgagagtggttatggtggaggaagggaaactaaggtaatcatttttctttcattgccttaagtcttgagtgaaagccgctccacgtgagttttttgcacaccagatcatggactacagcatgtagccacaaaggtctcctgaggtccaccctctgacttgactgatgtcaccctagggctctgggagagttgttttctggtaggaataacaggaagtagatcaatcagagcacagggaatgaaatggggagtgaaaacctgaattgttgtctctgctgatagaatcaagtagaaaaatttctccccagagtcacccctgaagtcctaacagtgctgtatcacttctgcctggggcttccagccgtagtcactgaaccctcttctggaagtgtctcctgatgagttaagctgtgctgtttccccacactgggtgagggttggtttgaatgtgccaaaagctttatggtgaggaagcactttggtttgggacatgggggtgtgggaggtggaggcgtggacagtagggctgatcatttgaggcagaaggccttcttgaattctgaggccttgtctgtgggatttgcattgagtctttggtaggaagaactattcagccaaatttctatttggtcaccccattcctctgtgataagtctgagttgggggagtgtctctttgcatgacatacgaacatcttggtggctctgttacatatggccagattccaaaacatcgtagcccatgccatggagatgatagttctgggtttctctgcactggtttacatgggtttgtgtttatcgggatcaggagaggacaagtcttttgcatagattggcctcaatagggggccttttattccatatgtggtttattctccaggtataatttaagatcatagcatatgcagagtataactggttcatttatttattgtatgagctataaaaaaagtgtttgtggtagtgagaatatttcagagtttatctcctctaatatggcactagttcctgaagccacttaactttacttcacagtatttggggtagcccactgaacaggattgatataaaattctggcctcttaactccctgaagaggaggaaagtctcaagggactgatgctgggactgtaggtgtaactgtatatccatcggggaggaataacatgtgtacccctggttccagctcctgcagagttggtctagagaggggcccacaaccaattgtctggtcatatgcctaaatcgtgacactatagtggagattgaaaggattctaaatatggcatgtgtaaaacaccagcttgttcttgagctgagccttccctttgggtgtcagcagggaacagaatgatcaacatgcacagctcaggctgcagatcagtggtgatgacacctgccccgggtcacccgcattgtgggtcactagatgggtgctgtttgtacatcggtggccgtgtcgtagcttccactacaacccagggcaaagtgaagcattccatcttgaatcaagccgatattttccactgaaatgacttacttgctttggcctcttgtggctgagccgctgccagattcctggattcctggatgggctattcacaaggggctcctctggctggcaccattcttcagcccgtcctttccagtgtgggagggagccaagggagctcattaccaggggacaaaactggatgaatggggactcggctctgctggcaggctttcactgcggcatcatgcggcacccggactcacagtgcagccagacggtgacccgtgggtggcacgtggcactctttgttcctagagtgactacatgggcgcagtggcagtggagaccactgggcccctactgaggtcggagaatccattctttgggagtctagtcatgcctctagctccatgttgtgatcttccattagcccagttttcttagctgtccttctgtttctctaagttcagaacacaagtcgtatttgctttttatgaaagtgtaagtaggatgatggaatgggcttactgtgccctttcattaggttgccccccttttttttttcaaggaggaaaaggtgaaatgggagtactaaagatttctcaataactttattcctagttaaaaagcattacatgttcaccgtttacaattttgaatatgtagaaaaagaataattagagaatattgtagctttatggtgtacacaattctattctctcttctgcattagcatgcttttctatgaaaatgtgttcaagataaatgatgttttgtgtaatttcatttctcttactatttcatgagcatttgtttgttactattctatgacattgctgcatatataatcccttctgaatatatacgataatatttaatactttctatagttggacatggatttttaaaatatttgctgttttaaacaaagcagataggtaaactgtgattccgagaggttgagtaacttacccaagctcatttacctggatagggctgggctgtgggtctgaaagtgatgcttatttcaggtatgtctgggatctgctcaccaggctgggatgggagctcaagggtggtgcacggtccagggagtcaggtgcaagccagggcattccacgagacagcccgaagcctcctgggcatacaaattgcagcaggagccaggaaggtgggaagacagcagtgtgtctggagtccaaggagagaggtgctgctgaaatggagaatgagtgtcagagccagaatggagtattggaggtaggatggagagagaggaaggtggtcctagctaacggttcaggtctgagttctgtaaagaggttgcacccctgtttcatagtgctttgagctgagatggctgcaaatcagaccttagacatctggggcaggagcaactgatctgttgcatctttcgctcagctctttccagcagtgtgggcgccataccttcacatgccattcattctgttttttgaaccgcagtaaccactaggaggtttttttaagtgttgtgttagaaataggccaccttacaacttcccataccctgggttctggttatgccctctggatctaccatgaataatccctatccctcttccatattttgatggctccccaaatagttgagcactaacctttcatgggtaggcggatggtatctaaagcttagttagctcttcggagctaagacctttgctccatgcttgatggatttcctaccatacttccttcttaagagggatgccaagggctggggagctcattaccagaggacaaaaccagatgaatgggggatgtgggatatggcgttgtattagtttgctagggctgccctaagcaaacaccacagactgggaggcttaaatgacagaaggatattttcttatagttttagaggctggaagtctaagattaaggtgccacagggttggcgtcctctgaggtctcattccttgaatttcagatggttgccttctacctgtgtcctcacgtggtcttccctctgcatacacatccctggtctctctgtgtatccaatttactcctcttacaaggtcgccagtcacattggtttaaacccacccatattagctcatttaaccttaattgcctctttaaaggatctatctccaaatatagtcagtcacatgctgatgtactgggggttagggcttcaatatatgaatctgggggaaggaacactattcagcccataacagacaccaaagagattagtaccaaaccaagactacactcctgcctctttgccaaaagttttcggtaaggagctgtattgtaatttttctctctaagtacttgaggatttgatgatatagttttttttttaaataacttttaaaaattacagaatcacaagttgtggcaaaatacaggaaagtcccctgtatccttcttcctgtttcccctgctgttgatgtcatggtaactatcacacagtagcaaaaccaggaagttaacattgctgtgatccataaaatttattcagatttctcttttttttttttttattcttttttgacatgaagtctcactctgtcacccaggctggagcacagtggcgccatcttggctcactgctgcctctgcctcctgggttcaagtgattctcgtgcctcatcctcccgagtagctgagattataggtgcctgccaccacacccggttacttttttttttgtatttttagtaaagacagggtttcgtcatgttgtccaggctgctctcgaactcctgacctcaagtgctccgcctgcctcggcctcccagagtgctggaattacaggcatgagccactgcacccggccaagatttctccagttttatatgtgctcatttgtgtgtctgtgtatagttctgtgcaattgtatcaaatgtggatgatgcagttttaagaatgcagattgggatcaagatgaaaccagataattttgagttgtgtgtgttaggcagacacacgcgcgtgcacgcacacacacacacacacacacacacggcacagagacaggctggcagattctcctgaggatggatgttctggagagaatgggagctggccagcggaaaggggttctttgagaagggaggctttgctgtttgcctgaatacacagaacaagtgctctaactcaggaggcacacgttttagacacaaaaatgtgtcacgttttctttgtttatcacttatcctgaaccccagtgcagccctctgtgtttccgttaataatgcaaagagaataattctcagatttcatctgccaagtgtttgattagtacgaagggcccccgaatactggccagcaaccaaagagaaccaaatttcctttcagagccctgggagcaaagagttatttgcctctgatgagtttttattttaacttgacattgggtaaaatgtgttttaactctccaaagaacgtggattgggtatggatcaaatatactgtgactgaagttcatctgaaaaaataattaaaaagccatctctcgtgggagcaagcattgctcattatattcttgcaacttcattgatattgaagtttccttcgttaatttctttttctaaaataaatggcactataaaagtggtcagtttgttttggccatattccattccctctccccagctgctggtcacatgccattttcagtgtgtttgtagcagcctgctaggaaacagcctgtggctcttacctggtgcttccatattgcctgggctgataggtgtttctcattcattcgcagccactcataactcatgccctgtggttcatggcatcaccgctgtgcctgctgcctgggtgacctttggacaagactctgtgggctctggagcccaacagtcttgaaattgaaatcctggcccctccacgactcctgggttttggatgagtttccaattgccctgagacttttgccttttcagtaaaatggtctggtctacctggccaggctttccatgaacgtcaggtgtcctgtacacggtggggatcagtaaatgctgcccttttcatccttatggtcatagcatctccatttccagatgtagaaattaaggcacagatggatacatgactgaactgtttaaacgcaggagcagatctttggacaagagcccttggaacctgattttcagcctgggatgtgatccatcttatagagctgagaatagcaacctcttcagtcctgaattaaaccagcagcgctcttcttttcctgaagaccccctccagtggctcatctcaaagtgcatgaagtgctagcattgccccaggcaggaggagagccagtttgtattaatttggaggcagcccagagtatggccattgccccagtgtgatgtatggattggctttctgggttctagcatgtcgcttcttaatttggaagcatattagctcaattttcttttaaataacgtattcttattttagtaacattgagaaaaacagaaatgtaataagaaaacctaaataatatgtaatccagatacctatagaaaattattgtcagtagttaggtatattttattccagccttttttctttgtatatcgttttgcttagttaaaaaccatactataaataaacctgctttttatcagttggcatattataaagtttttcctgggtcataaacaatatacatcattttagataattgcatattattttgtcaatctagaaatgctggaatttgctagttgggcatttaggtgatgaatgtctctgtggctttagccttgtcgacgttggctgaaaactttaaaagctcaggttagttcagatagattcagtgtgagctgaaagccagccccctggccctgcggtgactttttccaaaagataaatgagtgaggccaggagtgtcatgcagacgggctttgggccggctatgggtgttggcattcttgttttgaaacccccttccacatctgctcaggggtcacaatcttaagtgctgaaggggtgcagctgatgaatgagaaaagcagacagtgtggagcctggggagctggtccttgcctcgtccttcaccatttgttgccctgtgggagtgcaaagttagtgtttccagatcttctgattgttaagagaggctggaaatccgtatttttcaagaggattgagttgccaactcattgaaatcttctccaagccctttgcgagtcagcattggttagcatgtctcgaacacatggtagctcaaacacacacggtagcttgccatggtggcaatttcaaattgcattcattgatttcaaaagaccatcaatttcaaattgcattcatcttttgagttgcaaataaataaaacacgaaaaaagaaaagaaaggaaagctgtcgcacattgtgaatgtcacagccagaaaaaaagtgttcttcgctgtggttctgaatgttaggggtattggatttggaggaagaggacaggggatcttgcacgaacagaggacaacctggcaggagtgagggtaacaccactgctgagcggacccactcctactgacaccttgcttactgcctcacaatgatggggattcccaggattggaaagaaatgaaaccattttcctaagccagaggaagaaaagcacggttcaaggttccccgaagagagtattgggatgcagaaaccaaaaccatttgtggctggttggggcctacagatatttactgtgtgtgcaagagcatctttgtgaagaaactttagaacatagcactgaagtgtttgataggcaggaaataggaccagagaggcccaggatgacctgaagaaaggtgaaagtccatgtgagggaattttccttccagaaggatgtcaaagaatactgctagttacttctttactccggcttccttactgcacctgactggggaaggcacacccatcttatttgcttttcaactgtggcacaggtattgttcttaaaaaagattttgagacatttcctctaataacatgcgtattgtttctcttcagttaagactgtttacttttctgagagagaataatcttggcttcattttctttttgtccttttcacctacaagaagcattctgtgagagcagatggcatgaacggtttggtttctgtcgagcattgtgttttgctattgttaacactgggatttgaggttcatggtcttcctccttagtgggaagtaagttcttcattgctagataattttttagtgttaaaatgcctcacagaagagtctcttgtgaatatttgcttttgtctgtctgtccagtaccttgttttttttttttttttttaactaggaaactacctctcccatcttaggtggttgctgtgggttgcagaagtggccatgtggtcagtccgggcatggtcaattgtgacacagagaaggtctacagtagtctacagtgacaggccccagaagtgggccaatcagagtccactgtggggcgagagaagtggactgagagaaatggaccatcttctcttgtaggactgctactgaaagaactctgaatacccagagattccagtgtccatcattgctgccacatgcagagaacttgcctaagaatgaatgaacttgcctacagagaaaagtagaccaaggaaaagggagagcaaaagggcttcctagatccagccgtgcttgaagctagcatctagcccttagaatcctagtcacttgaacacataaattatcctttccaacatctacagctgccaggtttctgcctcatcaggcttgagtgcctgtcatgtcataggagttggtctggattgcttccctcttgaggtataaccaagcatctttgaatagggatagagtccaggggaaactcaagtaaggcatttgttctctgctcaaagtgctagttctttcacagtacaaagattaaccactcatgagactctgaagaacccctgaccctatgcataaaatgaaaggggctagcttgaaagcgttggcttagctcttcatttcgttatttcagaggcattgaagttacaggacttagatgccaaaaggagtatcccctctccacctttctccctacctatcaaaaacaaacaaaagtatttaaaaataacctgttggcaggctttgtgcaggaacagtaagtgtttaatagcacattgcgtatgtgggcaggagcatgttgagcatgctcagtttattcaatggctcgtttattgaatggaaaaaatataaccaatcctggctcttttacttgactgcaattgccaaaggtaccttaactccctcaaatgacttcatattgtcaggaatgaataagctaaataaatgagtatgttccattcccagcgtggctttgccatttcattcctgccaagccgtgtgtgtgtgtgtgtgtgtgtgtgtgtgtgtgtgtgtgcgcgcgcgcacgcccatgcttattttaaaccacataatagacaaatatgaagataccaaagccttgggtggctagtggacactcatcaaaatcgagatgtatttctttagcgctcagattcaagaatctggcttcagaatgtcaggagtcatcgttggctgcttgaagctaaaggttcttggatgtgccttgcgggagtcggggccataaccttttcgaattatgtggagatttacgtgtatatgtaccctgggaggaaagctttgactggattgaatgaggttcatgacccacagaaggttaaaaccatataaagacctaatgttagactttggtgacaggcattttggggtgagataagtctagctagttgaggtgagataggctgtatggagtgacagatggcatttagagactggaatgttgttcactgttcagctcttagcttgttttgctccctggagagccactgtacttacaacaggaagcatataagcatcacttaggcaactgtggtgaaaagtcagaatgcattctcagcggcattggagacacccctcggccctccactcccccgaaaattcctttggggctgaaattttccatcccttctttcagcctaaccgtgggtgttttgggtaatattcagcagattttctgtgctggtttgaactgatgcacagataggaaaatcaaaacttttttttttttagttctaaaagcaaaaacactttaaaatggcacttggatcattaatagaatctgaactctcaaagtcaaaattttccatgtgttcttactaagaaaaagactcactgttggggcaattaaaaacaaaggcagaaagttgtgagggactaaacaattctggggacatgaatgaactggccaaactttttattggcaaaccttttatgggatagttggtgcatttgagaaaccctctattttataccacggcctcctatttcgggtgtcgggggactgagggaggattggcgttgcactcattctgatggctctccaaggagagatacttttctccctttctctctgtaatgttccaagcaagtggggccaatgggtgtgatttctccctgcttccctttctgggcaagatgctattaccataagaacattcacgtttgcccacctgccttgtgggttgttaatggagtttacaaagggaatttggattctcagcaagaggtctcattaacacagcaaggatctaatagattctaaaattgcgtatggacactggaaccttttgaaacctggtggtgtctattattagatctaaatcatttcgccaaccctggcctcaggctgtacatttgtatcatggggcaaagagccttctcttcatcaaggtagatctaccatattgattgaagaacatgttaatacctgtgattctggtgacaagacaaggtaaaaaggctattaggcagtacatagaggaaaatgtctcccacattggtgcttttattttatttttaaatatcggccttgttactggttggtgtgtttaatactaggattcattactatcataaaagagagtttaacagctgtctgcttatttagacaagtgcgttaagcacaggtgagtttggaatagtnnnnnnnnnnnnnnnnnnnnactagctcccatttatggggtcgcagctgttatgacatacagacaaccagtattttgcatatactctctcactccctcctcataaagcccaaggagatagaggctgttattctttctgtgtaggtaaaggagctaaagttcatggggcttaagcagcttgttcagggtcatatggttagtgagtggcacggcccaagctacagtccggtctggtctccattatcccaagggccttatctttcccatcgtatgctacccctccaccatccccaggcatgattacatccacaccaggataatataggaccccaagaatgtcacactaagtatgaaaagtgactcaacccaactacctaaataggtatacagctctttctcagtatagtacccacctgcggtgctttgtcattttagctgtaaagtatgaaatggtgaggcgtttctaggccaggagacgtctgatgggtctggggtattcagggcctagttctgtgggaattttaaaaactctcatcagataaagcattgctcccacaaaaaaatcatgtgagttgttttcaaaatctccttgtagtaaagtgagagaagctcactcaccagacggttttgtttacacttcaggcctggcagcatttaattggtatacattcactgcacttatgcaacttggacttgagtgtttcactcccagacttgatgaagctgacttgcttttctgagcgagtcaggagtgattttaaaacatactagacgccagcggggacaaaaatggtaagaaggtagggcaagaaagacttcatggatcatggatgaatacatgagaaagaacaagaagtagagataatgtaatccccaagacctttcctcatggggaaataatcagcatgagcagttattgagctctgtggtgttctgaagaccctcaggagtggcgtgtccacatacatgaactgtgtttgcagaagaaggtggttacacgatggatggattgggagtggcaaaggcaggcctccttaaggcatcctcaaggatttgacgtccaagtaggtgaactctcttccaactctatgtcctgaagccacattttcccgaagtcattgagatagcgttttggtgaccttcagaaaaaatgacagtctcttactggtccatcttggggagtgaagagagggtctggagattaaattgggtgagggaccacgtgttccatgttggagcattggtgcaaagttgggagactcagctcctccagcttatgatgacaggttcatatttccagtctttttttaattaaaaaagttgtaaattttggtaaaatattcatacaggtcaccatcttaaccattttcagctgtacagtttgatagtgttaagcacattcacattgttgtgcaacagatgtccagaacattttcatcttgcaaaactgaaattacctcttcaacaacaactcccattccaccccctctccaggccctggcaaccaccattctactttctgtctctatgaatttgactactctaagtgcctcagataagatcgtagagtatctgtcttttgtgactggtttatttcacgtagcaggttgctctcaaggttcatccatgttgcagcattgggtcagaatttccttcctatgtatattatataccaaatattccactctatgcttaaaacatattttgtttgtccattcatctatgaatggacatttgggttgtttccacctcttggctattgtgaataatgctgctgtgaacatgggtgtgccatgtattttcagccttataaaagtatatctccatctgggtatcctaaggtgtgttaaactcagtaaatccataattcatctctttaattttctcccaggtttgccttattgaccagccttgtcctcccctctctcttcctgcatttaaaagctccagcctctcatggatcagggttcctgcacctctctgatgtctggtccccagcctcctctactcgtcccctccctgccacaggtcagctctcagcacctctcaactggaccactgcatctacctctgatgagtttcactgtgcccaatccagcctgtctccaagttgtccttcacattgccactgttccaaagcaggctgtgaactttatgaacccagagagatgtgcgttgttctggaacctttgttacaaaggttccaagagctctgcatgggatttaattttattttgttacatgcccaatgagtaataaccatatggttatgtgtattaatataatgcatatggtgagattatagtattgtatttttgagacacttaaaataacctgactccattttaacagaggtgttaaatttaattgtctacattttattcattcattcaacacatattaattgataacttacgatgtgtcagtccccgtacaaggtgctggggatacatggatgaatcagacctagcttctgtctgtaggagtaataataaaatcacccaatgtttattaagcacttattgtgtgccagagactgggctaagttcttgacatatattatctggtgtaattctcaaaacaaccctgagttagtttttatttgccgcgctttatgggaggaaatcctgatgcaaagagcttgagtaaagggacaccttggggattggagtcaagggggttcttgctcctcacaatattctcaactactgtgttttcctgcttcacagcaaagtgtaccagcgagtgtcatgcaaaagccaacagtttgaaacaggaagggcaaaatgaaatgaaacaccaggctgatacatatgcatttatagatgtggagctggaaaatattgaccaaatgtgctcagaaatattttacaattgtgaataatgaccagtcccttgcaaggagacagccttccaaaccgtagttactgttagagaaaagaaacaacattctgcatgtcctcaaagcaagagctcacgtaaactcggtttttcataggtgtcaaatgctgctccctgatgcgatgcattatgcaggcaaagaaataacatgacaaagcctctctcacagcctcagaaaggaaggtgatgtctccgaactggccatctggatatagctaggatgaagcattttcagaatttgccgaggttcacagctgaggagaggggccagtggcatcctctgctgtcaggtagcccctcctcctcttcctctgtgaatgggcaaaccctgcttcttctgctgggttgtatctttttttttttttttgagacagagtctcgctctgtcacccaggctggagtgcaatggtgcgatcttggctcactgcaacctctgcctccctggttcaagcagttcccctgtctcagactcccaagtagctgggactacaggctcacaccactgcgtcgggctaatttttgtatttttggtagagatggggtttcaccatattggtcaggctggtctccagctcttgacctcaggtgatccacctgcctcagcctcccaaagtgctgggattataggagtgagccaccgcgcccggctggtgtcttaagtgtggaaacacacacacacgcacacacacacacacacacactcacacaggagtagatgaagggaaaaaacagagattgctattcatcacacaaaagccaagcatgttcttttaagaaatcactgttgctggagacttttaggcaagtgatgtgagcattgaagagacttttagtgtaaaatcaaggtggaagattaggttcagtagtttgtagtctgcagtggtgactgtcttagaaagctttggctggtaggaagctccattgagagagtgcatatcgtatgcaaggcactgagctcactgttgcctttatgattgttcacttcatcttcataatggctgtttttcctcagtaggaaactgaggctcagcagaattagtaacttgtgcaaagtcatacctcctagtaggtcagtgatgagacttgaatataatgttcactgatcaaatctggcctgaaattgagatttcatagaataattgattttttgtcatcatggaaaacttaaaacatattcaaaattaaaaaggatggttgaatgaatccctgtgtgcccattttccagtaattatcagcatgttgcctttcttgttttatctctacccctacctggcctcccttctccgtgattattttgaagcaaattttagatataccattttattagcagttttttttttttgagacagggtcttgctctattgcccaggctggagtgcaatggcatgatctcggctcacaggaacctccacctcccaggttcaagcaattctgcctcagcctcctgagctgctgggattacaggcatgtgccaccatacccagctaattgttgtaagtttagtagagatgaggtttcaccatgttggccaggctggtctcaaactcctgacctcaggtgatctgcctgcctcggcctcccaaagtgctgagattacaggcgtgagccaccgtgcccggcctatttgcagttatttctgaaagttatttcaaaacataatcacaatcccattctcatggtcgttagatctagagactttatcagcttcaggtttcatttcttaggggcactgatctttaatcggtgacaatgatgatgatgtgtgcttccatcatgggacacatgtagcttttgtggtgttaacagctatgcttggccatggccttgggggtggtgatatttaaattccatcattactcctttgattgcttctactaagagaatcttccccatttcaactattttgttatcctgagttagaattggaatgagaaaaggaggaaaaatcctccccaattactaaaaacaatttaaaatttaagatttttttttcggttatttttctccttaaggtatatcctattagaaatatacagcaaaattactgtgttttacagtaatggaaaatggcttctctctgtgcagttatgactccaatgaacaattaagtttgcttcattttgcttttgatttttatagattgcttttccaaaaatatataattatgtaagctatttacagggcttcaaactcaaatctacaaaccaagaatattctgagaattctagcttctaagcctgtcatttctgttccatttcttaccttggaagtaatcaatttttctttgtttttggattttatctttctgttttaaaaaatgaccaaatacatttatatattattagcttccttttttgtaataaaatgtagtttatacagtttctctactttttcacctaaaaagcatactaaaaaaatcacagaatattgcagtatataaaggatcaggataacaagcagtacatagagacatagaatcattgaatttttagagatgttaataatagcaaacatgtggcactctgtgctacacactgttttcagtgctttacataaagtaactcattcttgtaacaacagtaatcttctgggggtatgtactattattatcctcattctgtaggtgaggcaactgaggcacagagaggttgggtaacttgcccaaggtctcagagctagtaagtagcagaacttgaatacagttgtctgctgttaaatgccacattacactgcttcagaattgccagagtttaattttctgatttttatgagtcaggaaattacaaccctaggatggttatgttaaagatctgaatactcacgtgccctgtccccagggttcttactttttctgatggtactggcttttcttgcagcttagtgttgagtctgggctttgatttttacctaactataagctaaaaacttagactgttatttcatggatgctcagaagacatgagactcctggatcagagacaaagggctttattactcattgacaataatcagtatgtgtgtctgttcttcttaccttgtaagtaccataggggtgatggtgaggaccaggtggatgtctgtacccccagtgagtgttacaggagaggaatactgaattggggaagtacactactttgacgtcaagcagtaagcaagcctaccctttgccccagagacatacctttcctctttcttcaaggttgctcactgggaaatggctaggcagtgaatggtcagggtcttgcattcttggcatacccagcaagacatgtagaagcacagagacccatgggtcactgtctgccaaaatgcttctttgcaccggttttaatgattttagaataaagggaaaagcgggtgccccataccacttctttgccaaatgacttctttttaatacatttgccagtattccctgatgcatttactccaggttttgtcattctcaaattctagccatagcaaaaagagtcaactcttgtttgaagaccacctttaacaaattctaaatactactacattgcaagtctatgggttttctcttttatttgtaatggggaccattttggaattagctagagagattaggttgacaagcattgatgaatttcattaccacataatagacggtttctttttcatttccttttctatttttccggttgaacttcttttcgatgttaagcctagtttttgttgccagtgagttgtataattccgtaagttactgcccttcctaactaaggccctgactataacttcgcctttttatggtaacacatattgagctttgattggtaaaactctttggaggcgtccttcgtgaatttcctgactttttttttgtttttgagacagagtctcgctttgtcgccaggctggagtgcagtggcgccatcttggctcactgcaacctccgcctcctgggttcaagcaattttcctgcctcagcctcctgagtagctggggctacagccgtgtgccaccacgcctggctaatttttgtatttttagtagagacagggtttcaccatgttggccaggatggtctcgatctcttgacttcgtgatctgcccgcctcggcctcccaaagtgctgggattacaggcatgagccaccatgtccagcccagacttcttaggataaataagaaatagtaagggttcaatggtgagaagtggccttttaagttgcaagaaggaaaatggcaacacaagggacttttgtaaatgtggtgtaattctgctccattgaggaagactgggacccgaggatcagaggcatggagggagagaacacaaaaaacaggacctgggctagagaagaaaggtcaagccaaggggtgcaaaagccattcagcactcagcccaccccttaccttaaaacctagcccacccctattagctactaggatgggaattgttgagttcaaccagcctgatgtttgcaagtatgatgtgctagacatggagtaacgcctcagctttttcctctcttctgaattttcatgcaaggtggtagactctggagtggtgagtggatgggagagagaagggcctgccacttccttcctggggaatcctcaagaggtttcacctgcgttgcagagactgagttgctgagcaggtatctgtgcctatatgtggtcactcttttaggagattttacacttctcactgggcctcttcttggagttgtttttttttctgtttaaccaatctcagtggggtctttcaggaccttaaaactgtttcaagggacaccacagttagcctgggaaacataagaggaaatataagacctaattattaaagtttgcacagcttatcatggagagagcactgcttaagcccttcctaacataggcagatcatcgagcaaggagtcacaagtgggttagtgactgagggtgagggctctggagccagatggtcaaggtttgctcctaaccctgactagctctgtagcttagcttcctcccagatacaacgggaatgataatactgtgtctcttattagagatgctgtaacgattataggaagtgacatgaataggtgccatgactggcacatagtaagtgctcaatgcgttgttattaaattgaggattgggcacaagcccaatctactaatttacatgatttctagatttaagctataggaggttttcgtcctatgatctggagctgcactgtccaatatggcatccactaaccacatatggctatttaaattaacaaagccaaatacagtgaaaaactcagttcctcatttgcactagctagattcgaagacccagtagccacatgtgactgttggctagcattttggagactgtagattgttgaacattcctgtcgctgcagaaatttcttatggatagctctggcctggagggtttaaactttgagggatttgatgactgcgtgtttaattttggaacttttttcctgatcccagtttcttttctacaaatagaaaagaatgcatgtcgtgcggcttacaggaatgtacagacttcagtgagtatgggattcacacagatgaggaagcccttgcagatacatagaggagtaggagtttctccaaggtgaaggctgaggctgtcctgagaggtggccaagggtcccttcagtgccttttagtctcagtctcctgtgcagaccctctgggtgaaggaggctgtatttcctccattgctttagcccccaggaggacattcctgagttcgatattctgtcctgtttctctcgtaggcaccatatgtcccaatttgggttccacaaatatggtcactgtgattatggggcacataaggctttccatttaagttgctgagtacagatcattaatcctgttcagcctgtgccccctgaatctgcaaagaggaagaatccatcctgaaaggggccagagagccaggatgcctttgtctccctttcttttgggttttatctccatgagaagtgggtgaagggtgtcagctgtgtatttgtagctaaataaccggctgtcttcccagctgacgatgtaaaaggaaaccacccacttacattaaaatgtgtttctgctttatgagctctgagggttcattagagatggcgttaataaggactcctgtgctcagctgtcagctttctgccttacctagggggcaggtagcacgggcaaagcactctctaggtgccaggccccatggggaacaagtggcgggaggcagaagctttgactgttctgcccgcaaagcatgaagggtctctgggaggcagccaggtgcaaggggatttctgagctgcattttaaaaagtgggagtgggccaggcatggtggctcacacctgtaatcccagtacttccggaggccgaggtgggcagatcatgaggtcaggagtttgagaccagcctggccaacatagtgaaaccccatctctactaaaaatacaaaaaattagctgggtctggtggtgggtgcctgtaatcccagctacttggggggctgaggcaggagaatcacttgaacccaggaggcaaaggttgcagtgagccaagatcatgctactacactccagcccggacgacagtgcaagactccatctcaaaaaaaaaaaaaaaagtgggagtgaggcttataaatctgtggaaagggaagaaggggagggggacattctgggaagcacaggttatgcaaagttttaatttgagacaatgagaacaggatattagaacaactttattgcttcctagttatgcagtcttgcataattgacttaaccttggttttcacatctgtaaattttggaggcggtatctaccttatggggttatgagtacctaccttatcgggctgttctgaggatgaatcagttaatacaggtgaaacattcagattcccacctggctcagaggaagcaatcagggaaaattagctttcgtcattattatttatcttcttcctctgcatattgctcttattattgaaagagaagtagtttttggagatgaattcaaatgccatctctgccagtgaccctgcacaagccacttggagctttctgagcctcagtgtgctcatgattaaaatggggtaatactatctgcgttatgaggattcttgtgaaatttaggtattgtctagaaaatcccagtgcagggcccagtatagagaaggtacttagtaagtgttagtttccttctctcctccttctcccaaatttcctggtagtaatttggcaacccgtttagttaaaaagtgatgagacgaaatggcatttgagcaagattaactcagcagctgtgtgtaggatggattagctcatgtgcaacagtgcaacttggaatactctaaacattggttttttttgttttttttttttttggtatctaggtatttgtgtcagagttacaagatggttccttatatcattacagtagctttttccatgtgtcaggctactctgaatgctttacacgtatttgctgatttgaccctccagacaactataaaaggtagtactgttgttcacattttacagatgaagtaactgaggccagagagattaacttgcccacgatcacccagctagtgtgtggtgatgcgggatttgaacccaggcttcagaatctatgctcttcacctcagtgattgacacttttgaaatttctagacagcagggggctgtttgttgcatttctgagttatggaacatggtaagactaggaaccacagaaggttaatcaggggaaaaagcataggccaccaggaggttttatcctagtccggagaagttgcgtagggaagggcaggcccccaagactttctaaacgtagctgggatgttgtgcccccctctgggctcatctgggcctgtcccctgctctacttgtggaagctgccttgggtgctgtattagattgttcttacattgctataaagaaatacctgagactcagtaatatataagaaaagaggtttaattggcttatggtatggcaggctctacaggaagctagtgccagcatctgcttctggggaggcctctgggaagcttccaatcatggtagaagggaaaggaggagcaggcacgtcaaatggccaaaacaggaacgagagagagaattgggaggtgccacacacttttcaacgatcagatcaagaactcgctcattatcacaagaacagcaccgagaggatggtgctgaaccattcatgagaaatccactcccataatccaatcacctcccgccaggccccacttccaacattgtggattgcaacttaacatgagatttgggtggggacacagatcatataggcgctatagcagaagaatgtggttctgcagcaggagcctccacctcccagctttgcagggctgggcagaccttcccccatggttcgctggctgcagccaggcctggcagaggtgggcagatgctcagccacagatggatgccacgctgctgccagctccggcacctcctaatgaagtgtttcatgggtcctgcatgaaggtcagcaggcagtgacagagggggtgccaggcttcttccctcctcctctgcagcattccagtcatagcttggactctttcccgtcagtctttgcctcctacccgcctcctccattctcctccacacctttgcccaggacctctacgctgctataaagacatcagcagcccccgtagctcacagggtgctgcttcgagccatgccagcccgctgctgatgtgacacagctagcaattactgagttcttcccacgggccagacactggttctatctacttagcacagagaggcctagtcacttgcctggggtcacatagctagaaagtagcagtccaaccttgaaccctggcagtcaggctctggagcctatgtacccagcccctaccatttgcaccgggagctctcaccacatgttcccattgggccctaagctcttccttttgttgcctttcatttccttctctccttgttcctggccctaccacttcaaacttgctttccctcctctcctagcatcacatccaatgacagcagctcctgcctggcattggagccattcaggtctcctgtgtctctgggcctaggttcaggtcagtgtcctgtctgtttctggtgccttcctcggggtcctgacacctgccctttctgatacgcgtgcaatccaatagatgacaatgtttgccaagcctgagtctgtgccagcaccttgctgagcacttcacagcccgtgagactcccccaagcagcttttatggaagaggggatccagactcagggacattggcttaaagaggttgtagccagaccccaggggccactgactccagacccaggtgcatatcacagtgccaaggggcctttctgtgcttacagaaatgaatcagttggcatagtgaatttcaaatcagtgcttaaactgatggccctttttgtggttcaggaaatttgtgacagggtgatccaagagcaccactcatctggcaccctctgtcactcaaaaaacccctgacacacactcacatgctcatgtgagtcgactgtttcctcctggctgtgtttgtaccagtgtgcctgtgagtattgatcagggttcaggggcatcctccacaacccagagaatgaatgccctgtgtaaatccccctttctatggggagatgtgagtgagtgagtggtgaatgagcgaatattctgcttcctgattgctgcctctctgagcaaggtgtctgccccctcctaaccaccccagcatttctggaaacccttgagaacattccacttgggagctgctaaatgttaatgagggatcaggtcaggaggggcccccttgacctttgcccttgggctttgccaccctgccgttttaggagggtgatttattgaagtgaaggtagagggagtgggtggaaaggaaatcaccctttaaaatttatgaccattttctctgacattaacgtgcaagcctctggccgtgcaattagaggttgttaggcagctacaatgggaaattaattctgtaggctcccttgcctggttgtgggcagcactgctccagggcaggtggaaagtaggcttgtttcactggcctggccggaaggttgtagtgttctcctgagaagggaatgtgagctggtttaggtgtgttggggcagggcggggctcggctggggggtgggagagagacactgaatcagtgcatgagtgaccagctaggactgagcccaaagacctgagattccctgggaggctgtggggtctgccacccagcagatctgtgtcacgggagtggcgctgtcactcgttgaggtggtggcctggttcctttggccttagggaaggacaaacttcaactctgagccttgattgagtgaccttggccaagttacctagcttttctgagcctcactttcttggcaattagatgaaccagaggtttatttcactcagtaagtaatcttttctcttccttcgtcttggaggttttgaagcttctaatctcccatgggttttgtactttttcttactcgggatgtttgtttctctttgtctttaaaaaaattatttttcctcctttttaatttttatgtttaaaatatcttctattcattaaccttcatggagcttgtctgtgtgcaacttcatctgagagcgctcaggcttccctctctcctctgcccaatgcagtgctttgcatactgtaggagctgcataaatgccactggcttatgggcatctgcagttctgagagtgagggctgggggctggtcttaggagggcagctctcaggctacaaatgggggcttgcaccagcgtactggctgaggactgcctgcctttgagctaggtcttacccatccacgacaaaaatgagagaacagtacaaggtggagagtttgtcataagcttaatttattcaatttagagtcttgttctttattctagacaatgccaccacctactgttttgctgtttaaatgtacctaattttaggaaatcataattttggatcacggcagcttttcttattaaaattttacttgtagaaataaaaaggtggcacctctgtcatttacccctcaatattttatatttgactcttctgtgaaatccaaaaatgtagcaactgctgaaccccacaatgtctgatctatagcaggcatttcagagcctccaggacttgattagatattgttacacagtggtgatatgagaacacacacctgtccatcgttgagattttgttttatgtatattcctatagctgtgcaggtaaaacatgccatttagcagtgctactatggcacaactgcagggggcaccatgtagagaccgtagttggatgtggcctggagttgtgtgtcagtggccatccctcttagattgacgatgcccaggctcactggttttcaaactttgttttgcaacagaactctgctggaaatgtatgtttgtttgtttgtttgtttgtttcgagaccgagtcttgctctgtcgaccaggctggattgcagtggcccaatctcagctcactgcaacctccacctcctgggtgaaggtaattcccaagaagctggaattacaggcgtgcaccaccacgcccggctaatttttgaaaagagatggggtttctccatgttggccagcctggtctcaaattcctgacctaaagtgatcaggtcactgatcactcctcccaaggagctggaattacaggcatgagccaccacacccagccctttgctggaaatcttaaggggagttcccctattgatcagacagagcagaactgctctgcccgagtgggcgtggggcccagggcccagccgtttgacctcgttctgcctccctttctctcctaaaagcatctcccttgaccttctgtccttgtaattaattcaggtctccacagagcacactgaaaacctcaggtctagtctcatttccattttatagaaattgatggtaaaagacacatagcataaaacgtagcatcttacccatttgtaagtgtgcagcctagtagtgttaaggacactcccagtgttgtgcaatctccagaatgtttcgtgttgcaaaaccgaaactgcactcattaaacaactccccattccccctcccctcagcccttggcaaccaccagtgtgcttccttctgtctctgtgagtcttgctatcctagttacctcctggaagtggaaccctacagtatctgtccttttgtgactggtttacttcacttagtatcatgtcctcaaggttcatccaagttgtagcctgtgtcagaatttccttcctttttaaggcagaatcatatttcattgtaggtgtaaaccatattttgtttatccattcatctgctatggacactaggattgcttgcacctatggctgctgtgaattaatgctgctgtgaaccataggtgtgcaaaatgtcttttgagttcctgcttttaattctcttgcttacacccagaaatggaaatgctggattatatggtaattccatgtttaatttttcgaggaaccgccatactgtttttcatacccagtgcataattttcatgtctcattgttgataaaatagaggtgactaggaggctccaggaagaagccagagccccagaggacacagaatggcctgggaatgtattccctccatctgtgctaggtcatgatttgggcatcgctggcttcctctccccagaggccagctcttgctggattccaatgacctggttccctctttgtgcctcttcagggctaccctctggtgactgcctcccatgttgctcgtcttgggtgccttagcatccctcggtgggtcccttggctctgccttcacttctgtcaatagacctccattagctgctcttcattggaaacttttgagcatgccatttgctacctgcacatcttgtctgataaaattactagcaggatgaccttgggcacattacacaacctcactgtacctcagtttccttcatctataaactgcctccctagggttgctgatgtatgttgatctattacaaaggactgaaaacagccactggcacataggaagccctcacgtaagtgttcaccattatttgtatgattaccatatcctgtgcaaggtccctcctaagatgtaagctgccttaggtctccagggctccccctttggaatgtgagccccttacagattcagtacctgatttctgggcttcgaggcaagacagacatggccaaggggagaaaagcagtattggaaggatgctcccagacctatccaccaaagtgagacaaagcattgggtgaaccctcttctcagtaccagcttcacagaatagtaagcagctgcagcgtggggctcagagtggctttggcttctgtgcttacttagcaagtgatccatcacaagtcctgccagctccctttggaactctgtcaccccgctcagccatggacaagcagacagccacggatattatgacaatgcaagtcctggagggtttgcatctctgatatggaggagtcagagtaatccttcccactctcccccgagatgcttttcaaagaggagcctgctttgagttctgaacatctgagtctttcacgaaggaatgtggagaagtcaagggggcttttcttccctgcagaactgatgatggccatccagagggggaaaggcacgagcaggctccctctctctctctttctctccccctctttttttgggtgcaacagaaaccttgcacttcccttaagctttctgtagtacatgttaagattcctctgccacgcccaaatttcaacttttctccaatattctctttaacttagaatgaggactcaggccctaattgaattgtctttgaacagtttttgttctgagctatgaactgtatattccctttattcacccaacagatatttattaaatatttttggttgggcatggtggctcatgcctgtaatcccagcactttgggaggccgaggcaggcgatcacgaggtcaggagttcgagacaccctgaccaacatggtgaaaccctgtctctactaaaaatacaaaaattagctgggcatggtggcgtgtgcctgtaatctcagctacttgggaggctgaggcaggagaatcacttgaacctgggaggctgaggttgcagtgaacctagattataccattgcacttcaacctgggagacagagtgagactccatctcaaaaaaaaaaaaaaaaattacgtggctggcactggattctgtactgggaatgtgatgaacaaaggagataaggaccctggcctcgtttacattctaatagggaagacagccaaaagtgaatgaataagtgaatacgtaaacagacacaatagcggcaagttgtaatgagtgctgtgaaggggaaacaccgaaggcagcaaggacagcatatgcaaaggtcctgtggcggaaagggagagaaagttactatgccaaaataacaccccaggggcagagggagatggagagttggagaggtggccacagctggccccacagggcctggctggctgcaggaaagtttcagagtgcttttctgagtgtaatgggaatccacttgcagggtttaggtaggaacaatgtgatccgatggtgactggctactgtgctaatgggtctgggtgactgatttggaggcgactgaagataacatgtcaccctgggctaccaaggaggcagagaaggttggagagattttcaaggcagaattgagaggagttcctgatggattgtgatggagagggagggaagagaatttagacaatgagaaaaatcccagataatgcctagagcttttcactttctcaaacactcatcccttttccctcttattttgattaagcactatctgtcattttctttgaacatataaatatcacttggtgatagcgaagtaaaagcatcaggcatgatcctgcactagtttgtgggcatggattcagtatggacttcttacttcagggagtgtgtccccaggtcaccttggttctgtggacgctgagagcaggcctcttgtaatgcaagtgctgagaagacttagagataattagggcagcgtcttctctgcagagaggttgagccactcagctggtgtcacccagctggtcagtggcagggagccaggctgcacgtctttgatttttaacctacactctcaccagtgagatcagccctgggcagcctgtgaatctgatcgtgttaccttccattgattcccagataccctgtgttccaggcagtgccaagaaccagtgaggagcactccgggccctggtagacagaaacatccttcagagtttatggcaaacaggagagatttgaaagtggccagtatgtagggaaatggttcagtcagttatgttatatgaaaatgatggaatatttcccaaatattaggtagtggtcagaagaatattctgtaactttggaatgcatgtggtagagaaccaagtgaaaaaataggacttcgtagtatgggttgagtgtgcaatgcacttaaggagaaggacttgggaggattatactgtttcatttttcctaaatatgtctatgatgcagttacatgaaaaaggaagcatgctgtcagaacccccagttcccagtttagttgtcataatgcttaaaggccaaggggtaagagcaaatgactggagttaccaaaattcccctccgaggaagggcaggtcggcgtccttctgcaaacattcttctagccaacggaacctgccattgtggaatggcaaaggtggggacctgccgtgcgtgctgctggaagaagtttataatcaaatgtgtccatgagtccaagacaggatgagtcaatggtgttcacggaggactcttccatccccagtcataccccttaaagcagcacaaagcaagctcctgtcatcgggtcccgagtgaccacaggatgttattttggcctttggccctgtgtatttccttccctggccttgagagggctgtggagggcagatcaacagggcaaaggaagcttcgctctttgaaatatccatgcttgccccttctgggacctccctcctgggtgcacctctaatcatacgacccctccttgtcgaggaccgtcttttccgaggctctgtggcatatggtgacgatgacataggaaaagcagcttatctttgaaattcagcttgtgaattccaattctgtgaaattgtgggaatcctcaggcctttcccgaacaagctcccgtgctcttggtctggttgccgctggcagagttagtgtcttttagcttctcactcaggtggtgctttgttgcctggacaagctatactccttcttcccttttttctctgctctggagtgtttttgtggggtgaggagagctcttaaatccttctaggtcttgagatgatgacactaggagcctggtcattgtgggcaggaagtagactatagatagggccgacagatcgttgccttcggcctttgtcacttgtttaacccacttgagtgtttattaaaaatgtgagttagttcccgacattcactctggatctaggcttctcctggagcaataatagctgaagccagaagcgtctgtgcagcagctagacggggcaggttgctccgatggccccattgccctcccagactgctttcctcgttagtaccccctgcttggccctagcagccaggtgactttgggaccctgggtcggtctgtacactgcagagtgctgtcttggatcctggggctcttattgacacacagctgctggcaattcccctttggcccccgtgcaggtgaccgaaagtgactgcagcccagttagcaggggcttttccagttccatgtgagaattgtttatcctcccaactaggtgttccagcagggccgtgggagcagaagcagaattcagatgacagatagacgaatggagataaaatagagattgacttctgcattccttgctcagctttccacaccctaataaaagtctgagccagaaagtgggtggaagccctggccctttgttacctgccctttgtttcagtgccatgcggctaatgaatgccgacctccgggaagctttttccactcctgcttggcgcatgagaatacaaccagctggtccctccacagtgggctcaaatgtgaccctgcgtagtgctcctgggaggtgcatttgagctgtcctagaagggcttccagagctcgagctgttgccaagtttagaagtggccgcatgtgtggtgccagccacagcatcctattcctgcagataagcctacaggctctgtaggagtgccggcatgcacacagcaccacctgggtggaaagcagcagtcattggttaggaatttggggattttctaatctaagtgttctcccaaggaagtgcaagtcaggagagggccgaatgtgcacgagactctgcaggaaggctgaaaaactttcaaaacagtacaggcaattaatcagggatgcctgcatgggccactctctggtgccctgtgtttacagacatgagggctgggttttcctgccctgagaagagagggccgtccaaggaataggagagccatggcacaggaagtggaaagtcagtctgggatgtaaagttggaagtcagggtcctttgggtcctgtatcctgactaatgaccccaaagatattctgggtggcatgtgccagcctccttgccaagtgtctcagagcctgcagagcaccatccatcctcaattcctttaataacctgaggaacctgtcatccatttaggaatcaatactttggtttttttttttttactattatttctgcttacctcaccttttgggggaatcattccctccatttttatccctggtgtaaacttccctgccctctggcagatgtcattgttatccttgagtatttatgcagttctgatgtccttactgagtgctgaccctctgcatgcaggtatctaggtgtggttggggtgggtgcatcaaaaaggctagactgtgtgcagctgcttctgcacacagataactctgacacacacccaaattggcatagagactggcgctggggggaaggatgtgaccaataggaccagactgtctacctgggttcaaatcctggctccaccatttcctggctgcatgatccggcactaggtttctcatctgttagtggggataagggtagtacccatgcggagggcagttgtgaggagtaaaagagtaactatactgtaatcccagcactttgggaggctgagacaggcaaatcgcttgaggccaggagtttgagaccagcctggtcaacatggcgaaaccccatccctactaaaaatataaaaattagccaagcgtggtggtatgtacctgtaatcctagctactccggaggctgaggcacaagacacacttcaacccgggaggtggagtttgcaatgagttgagatcgtgccactgcacttcagcctgggcgacagagtgagactctgtccccccaaaagaagagtaactgtaggtgaattgccagcgtggttctgggcagctgtgaagccctatgaaagtgtgttggtggttgcctttaatatagaaggcagatgagcttgtagtcccagctacttgggaggtcaaggcaggaggatcgcttgaggcctggagttcaagaccagcctgaacaatatagtgagaccccggctttaataaataaataaataagcaagcaagcaagctgagcgtggtgctgcacacctgtgtttccagctactcgggaggctgaggcaggaggatcacctgagcctgggagattgaggttgcagtgagccctcatggtgctactgcactccagcctgagcaacagaaccagaccctgtctctaaaaaacaacaacgaaaagaaggcagactgtgatggattctatacggaagagataaatgccctgctgtggaaatgtagaggaggaaaaattagtcctgacaagggaggtttttaggagaaaggcagattgaagctgcccctggggaagaaagttgtaacaggcagaggaagcagctggaatgaggtagggaggcctgatggtatggagtctgcatgctcagggctgcctgctgtggccagagattcgggtgtgtgtattgtggaggggattgcagggggctggggaagcagagatcagtctgcagtggtgggtgaagacagccagtcgtgttgcacgtgggacaggggccctggctgggcaggcagggggagcccagccctgtcactggccattgatcccaggccttgaccaaatggggtctctaatccccaagggtcccggtgggttattaggaagggcagatgagcccctgcaggggaacgttgtgcagtatggcaggcgcaccccacatgggtgtgtgatcctttgtttttttgctgcaggctccataatgtcatccggtctttctagcctcctaagaatgaggttcctagttcttacctaatttctcttcaatttctcatgcactgcatcttcccgctgtttatttaatgtacatgttgtctgacttcatttggttctgtatttcacaaccagtctgattgctcttgtcccaagtcattgctttttggggtgagggctgatgtgttgttgaaagtctttggcaatgcttaattttatggtatgtgcaatgctaattctgcctttagtaatttgatgacagagacttcttgggaaccacagccagggagccaccctttactccaccaacaggtggcttatatccaatctgagaaagaaagaaaaaaaaaaaagtatttctctggctttcacttcatttgacaggtgagctgaagctattgtgtgtattctcttagtaaagtcagttcccacagttccctgggggtgatgtggctttgaggtaagaatgaggtaacagacttaaatgtacatgattttattgagatagaattcacataccacaaaattcacccttttaaattgtaaagtcctgtggtttttagtatattaacaaggcagtacaaccatcaccattatctaattctacaacatttcatcatccccagaagaaactccattagcaatcctctcccatcccctgttcccttaccctctggcaactgcttatccacttcctgtctgtggatttgccttttctggacatttaatatacatggaatcagtgcaatacgtggtgttttgtgtccaattctttcacttagcataatgttttcaaggtttattcacattattggtagtactgcattcctttttatggcttaataataattcattgtatggctgtaacagattttgtttattcatcggtcagtgaacatttggttatttccactttttggctaatatgaataaggctcctccgatcactcgtgtataattttctttgtttttctttcttttttcttttctttttttttttttttgagacagagtctcactttgtcatccaggctggagtgcagtggtacaatctctgctcactgcaacctctgctgcctgggttcaagcaattctcctacctccgcctcccaagtagtagggattaaggcctgcaccaccacgcctggcttatttttgtgtttttagtagagacggggtttcaccatgttggccaggttggtcttgaactcctgacctcaagtgatctgcctgcctcggcctccctaagtattgggattataggcgtgagccaccgcacccggccttgtgtataattttctgtgcgaacgtgcatttttgattctcttttgtatataccgagaattggaactgctgtgtcgtgttgtaactctaggtttaacattttgaggaactgctaaactgtcttccaaagcgactgcaccattttatatttccaccagtaatgtggattcttcacagcctcgccaacacttattattgtctctgatggtaggcatgctaatgggtatgaagtggttttgatttgcatttttctaatgactaatgatgttaagcatcatttcatgtgcttatcggctatttgtacatgatctttttgataaatgcctgttctcatcacatcctttgccgtttttaaattattagttttttaactgttgagttgtaagaggtctttgtattttctggatactaggccagatctgtcatttgcaaatgttttctgtcatcctgtgggttgccttaagtatacattcaaactagtacctttcactagaatattatgctcttggtcagccacaaagggtagtgctctgaaactctaccaaagaacagttgtatctttgcatcaccagcacctgggtgagcacctggcataaagtaggaaccggtgatttgagtaaataaatgaatgtttctgtttgccaccttttgagagtaaaaatgggtgtggtaagatagacagaaatggataatgaattgctgagccaaaccacagaggcaaagatgcaggattgcatgctaaagcaccttgtatctggctatgatgttcaagatcaatgaaagactggagtgcagatcagggattgcacctgtgtttctgatgcagtaaatatacttttccgaaatcaatagggtgactctgcagagccctgtaaacatggtgtaattactgtgctgagaattacagttgtcacatatcgattctgtcttctcagcaggtattcgtacatttcctcctgcccctagtgccactctgccccatctccaaaatctaattcccattgaccgcatcacactgctgtgtccaggagggaagaggggatgtaatgtagtgaggggacttcagctgtaccttcaccttggttgaggaagaggcagctgagtgagtcacagatttagggacaaggtggcacaaagttgctctgaaaattagatcaaagaatcccaagaagtagataggcatcaacctcagtggaagctgcctcgggaaataacctgctcaaagaaggatttctcattcttcagagtagactaggagggaggcttccttaatcctggaaacaaggcccaggtcatccctgcagaggaaacatctatatataaagtggctaacgtaagataaactgtcatcttagaaagcatcattcactgactcgctcattcgctcactcgtttgttctaaccttcactgaatagacacttgtgttcttggtgtgttgcaggagggaactatgctatggctggggcgatgagtgaagtacagcctctgccctcgaggagcttgtgttctcccaggagacacaggcagtgaggctagagtgcagagatgaaccaccagaggtggtgaatgcggtggggggaggaatggtgtcaggcctcttggggaggcttaggagagttacccacaggaagggagagcctgccaggaggagtaggtgtttgtcaggcagaccgggtgtgccaggcagaggggagccgctcatgttggggcctgcactcacagaactacagggcgtggaagggaactgcgcgaagcctggtatgatggaggcagttggctgccacccaggagtggggaaagtgaggttggcagtgggaatttcccacctctgtttacctctgctttgagggggtggggctggcaggagattccagagggagcatcccaggctctgagggctggtctcagtgtgggtgggaacacttcccacactgctgtgactctggggtgattgccgtgctcctgtatccgaacacccgtctccatccaacagtgtcttgtgttgattcgtctttggaactatatcttccttctgaggtggaggatgggaatggattgattggaacagtgaatggttctcagacttttcattctcaggactcttacagatactgaggcactccacagatcttgtttttaaataggggtatgtctatggatatttactgtattagaaattaaaactgaggatacacaggtgtgtgttctgttagccacgggcgatgtcttcacagagcatgtagaaacccccgctcatgagggaaagattgagaaaggcacatacagtctgtgaagatagttttgacctcctagacctctctgctcaagggtgttagagacagacccctaggggtttctgaaccacgcactgagaattccattggattagaagctgtgcgggtgcccctacgttctcacttgtctctgagccctttgtgagtttctcaggataaaccatccacccatggaagtggcagatcctgaatgccatctgcaggacgggcactgtgctgagcctcagccaggcggagatgggcgggtactgcacagagtgaggcagtcagaagtcctgccctctgcagtttccaggggcccaacattcaataaattgttgcagaagcaaatatttacctcaccactgggagagggctgtgtgggagagtgatgaacagcctacctggtcaggtgccccgcaggctttcctgagaagtgaatccaggcgcagaaggaagaggaagtggaagttggtggggaagaggaagtggaagttggcggggaagagtgttgcaggtccaggaagtggcccatatatgatttttatcagggtggagcccctgtggttagagcccaatgagtgaggggggtaaagatggggagaggggttgacctgcgaagcaccctctgcttcctccttccttctccaacagcaaggatccgaggggaaggagtccatcactggcctagacaccataccctgaaccgccccccgtggtctcccgctgctttctgccactgcccaagggctggacagcaccacccctcctaattcctaggaattaggcccttcttggctctgtgccctgagccatgttctcctcttggccttgggctctgatcagatgctcagttgtctcccttctctgcttccctcacttgccagggtcaccttgtcgtcctctgcctcctattgtatatatccctttcataagaataatagcccatcctcacactgtgagccactgttgcaggtgctccacaaacattcccaccttcagtcttcaccgcacccctgtgggcttggtcctgttgtcgttctcagcttccacgtgaagaaactgaagcccagagaagttaaacactgcacacaaggccacatagccaagatgtggtagggttgggatttgaacccaggccaacaggcttccatctagattcttaaccactatgctgggctgcttttcattctatgtcattttctttttctttttttttttttgaaacagagtctcgctctgtcacccaggctagagtgcaatggcgtggtttcagctcactacaacctccacctcccgggttcaaccagttctcctgtctcagcctctctagtagctgggactacaggcgtgtgccgccccacccggccaagttttgtatttttggtagagatggggtttcactatgttggccaggctggtcttgaactcctgacctcaggtaatccaccgcctcagcctaccaaagtgctgggattacaggcacgagccactgcacccagcccattctgtgtcattttctttccagctgtggaccatgtatttgtatccctaggctgaacacatagtaggagctcattagaaatttgacacatgaaatcatctttgtattccctcttcatggccatcatgtcttgtgcatataccattaataaagaaacaagtaattggaccaataagcaaaacaaacagcagtgactgccacgtattagcgtgtttggaatctgtaattaccagctttctttagggcagaggtgtgagttcataatgcctagacaggttctaaaaccatcctggtccctggtgaatatgccaacagaaggtattgtttttactattattactgttattaaaagcaaaagcctcttgggatgtgtacattccaagcccagggctggggctgttagttcccagcaaggacaagatgaggagggagtgattctcaaggaggtgatcagaagacccatcccctgggcgtgcactggggtcagaggccagcttttggaaaaggaaaatgagctaaggtctggctattgtaattcccttatctctgacttcctgctgaggctggttggtttctggcgttctacagaattccctggtggcttctcagcagcaggcctgagacccagaaccagtgatcatgtttgtgagcaaatgactgaggaggatttgatgcgaaatgggctgtgagtgttggggataaagcgtgactctcagttgtgctactttttaccacttctgggcagcctcagttggcccgctctgtgggtttttccctccagctttgcagatctgcaggcatatttatttgtgagtggagtaagcggaatttttcaaagagaagcagtttgcaaaagatgaaaaaacaacttgggataaatggctcatctggcaatgggaaatggcctccggcattgagagatctttagccttgtctgagcaagcagaggggaatttggcttctgtatcatcttagagaaagaacctttctgcctccttgctgaggctaggccctggggagaaacagcctaaaacccccgacaccatttgagaatttaaaagtttccctgtccagtcaacttttgtgcccctccttgtccaagcccccatgatctctgttccctggacttgctgtggccttgccttgccttcttttttttttttttttcttttttttgcgatggattctcgctctgtcacccaggctggagtgcagtgatgtgatctcagctcactgcagcctccacctcctgggttcaagcgaatcttctgcctcagcctcccaaggttgggactacaggcgcgcgccaccatgcctggctaatttatttatatatatatatatagtatatataatatatagtatatattatatatatactatatattataatatatatatatatttttttttttagtaaagacggggttttactgtgtttgccaggctggtctcaaacccctgacttcatatgatccgctggctaggatgacaggcatgaaccaccggacctggctgcctccttgacttctaactgaaaacccttctgtctcttctgtagatttcagccgccaatgtggtctcaaaagtacagggcaaatccattcccatcacacctgcaatcaaagcctccggtgcttcactcagagtgaaagctcatcttcctgtggcccatgaggccctctgtgatggggtcagtctgccttccccaccttctttcctggtggcatcttcttgctttctcagctgcagccacactggctctgttgttcctcacatggatcaagctcagttcccacctcagggcctttacattttgctgttccctctacctggttcactttccccagatatcctcctggctctccttcatttggttcagggctttgctcagatactaccttatcagaaaggcccttcctattggccttatgtaaagttgtatccctgttgtcatgcctgtactctgtcccccatactcagctttatttttctccatagaacttagccccaccagatgtagtattaatacatgcttcattaattagatatatagtttctgtcccactacaccaaaatgtaagcatcataaagacgaggacttcattcagttcagtgctatattcccagtgcataaagcatggcctggcacataacaggtactcaccaggtctttgtcatataaatgaaagggaacgactgagtctccatatacatttgatccatgaacaacatgggtttgaactgcatggacccgcctctatgcagatttttttcaataaatatattggaaaaattgtttggagatttgcaacaatttgagaaaacttgcagatgaattatgtagcctaggaatattgaaaaaattaagaaatttaggtatgtcatgaatgcatagaatatatgttgatactagtctatgtattaattgactgtttatgttattggtgaggcttccaattatcactattagtagttaagtttttggggagtcaaaatttatagtcagtgttttactgtgtgtgttggggtggagggtgaccctgtcgcctgtgttattccaggatcaaccgtacttcattttgtattcatctaccatgtgtctggatcccacactcactcagcatttctgcatttgatgtcatggagcaaagatgggcactggatttgggcagccccgcgtttgaatgccgcctctcccatttcccagtcgggtaatgctgggcaagttaacttcctgtctgatccttcatttcttcacttgcagaatggagagcatatgcctcaccttgagggctgttggaggaatggaggtttgggtgctcagtatttattagcccttatactacattaatttggtgttaggcaaacagaggaaagccttcttaaaaaacagctttaccaagataaaattcatatactataaaatttgccccagtgaaattaaaaccacaatgatatagataccaccttacttctgcaagaatggccataattaaaaagtcaaaaaacaataaatgttggcttggatgtggtgaaaaggggacactttcccactgctagcgggaatgtaagttagtacagccactatggaaaacagtattgagattccttaaagaactaaaaggagaactaccattccatccagcaatcccactgcttggtatctacccaaaggaaaagaagtcattatatgaaaaagacacatgcacacacatgtttatagcagcacagcttacaactgcaaggatatggaaccaacctaactgcccctcaaccaaggagtggataaagaaaatgtggcatatatacaccacggaatactactcaaccataaaaaggaacgaaataatgtattttgcagcaacttggatggagctggaggctgttattctaagggaagtagctcaggagtggaaaaccaaataccatacgttctcacttatgagtgggagggagctaagctatgaggacacaaaggcatatagagagatataatggactctggggacttgggggttggggaggttggaaggcgggtgagggataaaagacaacatattggtacagtgaacactgctcgggtgatgggtgcaccaaaatctcagaactgaccactaaagaactcgttcatgtaatgaaaaaccactggtactccaaaaacgattgaaattttaaaaaagaaaattataggctgggcacggtggctcacacctgtaatcccagcactttgggaagctgaggcgggcagatcgcctgaggtcgggaatttgagacaagcctggccagcatggtgaaaccccatctctcctaaaaatacaaaaaaattcgctgggtgtggtggtgggcacctgtaatcccaggaagctgaggcaggagaatcgcttgaacctgggaggaggaggttgcagtgagctgagatcacgccactgcactccagcctgggcaacagagtgagactccatctcaaaaaaaaaaaaaaaaaaaagaaaagtataaaaaatatacacagttcagttgtttagtgtattcatagagttgtgcaaccattagcacaattcaattttaaaacattttcatcacccctaaaatggaacctcttactcactagcaatcactttcattatgccctccctagcaggtgctgccaaacactaatttactttctgtgtctatttgatttgcccattcttaacatttcacgtaaacagaatcatacaatatgtggcctttttttgtttgttttgagatggagtctcactctgtcatccaggctggaatgcagtggcacaatctcggctcactgcaacctccgcctcctgggttcaaaagattctcctgccttagcctcccgagtagctgggactataggcgcgtgccaccatgctcggctaactttttgtattgttagtagagacggagtttcacgatgttagccaggatgctctcgatctcctgacctcgtgatctgcccacctcggcctcccagagtgctgagattacaggcgtgagccaccacgcccggccttatgtggccttttatgactgccttctttcaccaccatgatgtttgtaaggtccatccatgttgtaatgggtatggagacaccacattttgttcattcaaccattgatggacatttgggttgttaccactttttcactgtgaagaataattctgctctgaaggtttgtatacacatttggtgtggacgaggcaacctcttattggatacatccaagccagttccgggatgccttctctctgtggtgtcccagatcgtcctgtagctcctaaactcgttcctttcaaattaagaacatattttgagagagctattttacttatctcagcagacattcttttgatacaggagtaatttattcttttctcactatttcatatgactagctggttattcacttgattttgccacctgcagtaccccttctttgctcatcctacaggttgtctcttatccaaaatgcttgggatgagaagtgtttcagattttggattttttcagaattttgaatatttgcattatatatagtcacttacaagttgagcaccccaaatccaaaaatccaaaatctgaaatgttccaatgagcatttcctttgagtgtcatgtcagcactcaaaaggatttgtattttggagcattttggatatcagatttttggattagaaatgctccacctgtagcctgatgttccggatgcctctgtcagaccatagtctgctcaaccatgaggctttattttactccgctctcaggacgttactctctcccttgagtggcccttttctgaatgaaatttgccattctgctccgagaggacccttgactttaagcatacttgtctgaaacgtgatttttgaatacttagtttatctcattctagtcaatttatctcctaattgcattatctattatcccagtagaattatgaagcatttgtagaagattcattaatttttggctgcctgctggcaaggatttgataacaaaggcatagtcaggactgccttggcaagtacttgtgtttgaacttttgaggctttctcttcccattttcccaaaggaaggcttgattttcctgattttgcctgaagggcataggcaatagtggcgtgttgtcttgaaggagagggaagaatggtggggcagaagaacagctctctggttctactctgaggaaaggaaaacagggcatatgtcaggcaatgaggttgattaaaaacatctcagtccaaggtgtgtgggattccagagatgagtcatatctcacactcataggcacttttcagtgtattttcccctacagtgtattgcaaatcctacctcagggcctttgcacttgctctctggcttcattcaggcccctgcttgtgggtcttcccatcagagaggccttccctgaatacccttcccctactcatctgccacctttactcttagtcgccttacttggctttgtttttcttcacatattgccatctagcataaaatacatttatttacttattgtcattcctcaccagaatgccagctctatgagagcgacccattcactgttacatgtttaaagcttgagatggttctcagaacatggaagggacccagcacatgtgtactgaatgaatgaatgcatttgattttatgaaaaccctgggacagaggtattataattcccatcatgtgggaggaaacctggactcagaagactggggagaattattcaaggtcacaaagtagtcgctgctgagtcagaagttgagctcagctcttctggtcctgatgcagccatctcaggctcgcagggcccaagaacaaactctggcggtcatacagacaggctcagaagatgccgcagactgcagcgggaggtagcatatgaggcagtgactagagtggacattttaagaattacagagcggccgtgcacagtggctcacacctgtaatcccagcactttgggaggccgaggcagatggatcacctgaggtcgggagttcgagaccaacctgaccaacatggagaaaccctgtctttactaaaaatacaaaattagccaggcatggtggcacatgcctgtgatcccagctactctggaggctgaggcaggaaaatcacttgaacccaggagacagaggttgcggtgaactgagatcgcgccattgcactccagcctgggcaacaagagcgaaactccgtctcaaaaaaaaaaaaaaaaaaaaagagcaaggatttcctgtggcctgagaaagaaaacaggaaacaactgaaagctggccaaacagcaatgggagagacttggtgctgaggagggaagtggagccggggaaggaggagagaatgagaggtggaaatggctgtggaaggtcctaagcccaacggagagcccagcagtgatgtttaggagcctcttggtgatctcaggctgtccagtgcaccccatccccagcagcacaccagatgctttgttcctggaccaaactgagggtcctcgggctgcttactttcacaacccaataacgagatgcagatgagctgggaaaggagagagtttatttctggagccgggtacagggagaaggcctggaaaacatcgccagaccaactcaaaattacaaagttttccagagcttatatactttctaagctgtatgtctgtgtgtaagtgtgcattcatctgaagacataagtgattaacttcttccaatctgtaactaagatctgattcctgaagaccttcctctggagcctcagtaaatttacttaatctaaatgggtccgggtgctgggggtgattacccttgtctcctgctaaatcatggaggtttggggagttccttcagacccccaatacacctgtttaatcctaaataggtcctgttaagaattcctttgttatcttgtcgtgcttcgaggcccgggaaagtcctaggcaagatgcttggtgggcttttgttgcattccagcctttgtatatgggcactggctctttcagctttcagcttttaatatttaacttcaccagtcagtcagtgctgagacagttattatggaggctaccctgttcagctgttagggagaccaggcctgccacagtttctctctcgtgagggtttaactcggggagggtggggggggggggcggcagcagcctggggctgattaactcctgaatgttgtgctaatgagaaagtggtgtgggtagtgagaaccaatgccccaaataacatttcatctgattggatcacaccgtgggattttattgcagtagatattaattgtattctgtccagaactggttccttctggtgggttcttggttttgctgacttcaagaatgaagccgtggaccttcgcggtgagtgttacagttcttaaagatgatgcgtctggagttgttccttccgaggttcagatgtgtcaggagtttcttccttttggtgggttcgtggtctcgctgacttcaggagtcatgccacagaccttcgcagtgagtattacagatcataaaggtagtgcagaaccagactgagcagcagcaagatttattgtgaagagcgaaagaacaaagcttccacggcgtggaaggggacccaagcaggttgccgctgctatttcgggtggccagcttttattcccttatttggccccgcccacatcctgctgattggtccattttacagagtgctgattggtccattttacaaagtgctgattggtgtgttcaccatcttttaactagacccagagcactgattggtgcatttacagtcctttagctagacacaaaagttctccaagtccccacctgacccagaagctcagctggcttcacctctcagtatgggtggggaacctacttgttttcagtttatgaaagtaggttttcaggaaaagcaaacctgtggtagaaacttgttggaaatgtaatggaacctggaatgttccattaatcacaagacttctgtgtgattgctcagagctctaaaagtagatacaacggccttgtcatctgtaattttttttttgtttttggtcatttttaggtgaaatatttgatagtgctttatactttctaccctttttagggcatggtaaatgtatttgttggactgacagctactgcaagaagcaaaccctcacatgcatcattgctttttttttttatgctcaggtgactccagaacaggttttactaatatgtgggcagctctgtgtagtagctcttgccatgttagtgttgctatatttagttcctcctattcaaggttgctatgcttgtcggcatcaagcaggaggagaaaagaccctggtggaaggggcatgggaagtcttgtggaccaggccggaagtggcacctcattggccacagctccgtcccatctctggtagagaaagagagttgagcagtgtgttgggaagaagcagaagcaagctgggtactaacatcctttaaaattagatagtttttttttttttaatgtacttcgagtatgttctagaaagctatttccttggatacctcccttttgcgatgaagaagtggcagctcacagaattgagtgacttgctcagggtcacagagcgtcaggtgacagtgtgtggtctggaatccaggccttatccattaccttgtcccgtactttgtctttccacgagtttttgagtgtggccagcagtcctacctctagacttttctgcgtgtgccatgccagcttttgggaggattacagtcatcaccaccatctgaagaggtactggggacctcagctcccccatgacagcaaacatacccagggagagggggctgtggggatactcagtggatgattagggtttttagaatctgttgggaaggggaagaggtatacattaaaattgagtgccctagagaacaggagaattggagagaagacacatgattaaagagaaacgcatatgcagacccctctcccaccaccagcatcccagtgcttgggaaacccaaagccaagccctggctcctcagggatccccaaaggaaacatttatccccctggatgtttggatgtcccgtaatgatttagaggcctgagatcctgctcaaatccctggattctatgtggtattgaagaaggacttttaaaactagacctgacaggtccaaataaatatcctccattgtgaggaacaatctcatttgggcctctgaggctctctaaaaatatccttcattgactgttcactttagaatccaggattgagactcccaccccaccccctaacttcccttcccttttgtttttctatgttgcctgctcatccttcctcctctcaccagcctggccttgcctagggagtgggagttggcagggcttgcctaccaggagggttttgttgagaggcaccaagtccaaaggaatcttttgtctacaggtgcacttgaattgtgggcagccagcagggtgtgtgtgtgtgtgtgtgtgtgtgtgtgtgtggagggaaattcgtaggagtgagtgtgggtgtgcacacctgctctaaattgcttctactgccagaatgtactcctggagggatcaggaaggagtaagcccttagtcgattgagccagtccagccctgaggacattgattccagctccttgctttcattgaagggaggagagaaactcaaataggagccctcaaggagattgtgtgaagctttctgaattcggtgtcattttcatgcaattttgttaagaactggtgtatttcatcccctcctggttcattccgtgagtcatccagaaggcatcagagcctcgtcattttggcagccgcagggcatttgtgcccagcgaattatgggcagctctgatctgaagtaacaaggttgagtcgagataggttgagaaatgacccagacagaaacaggggcctcggctggcagccccagccacaccataactgcacccgtagctcagatgaggtcaggacatttttgctttgtgacagatttgggacgcagagaaaagagttcaggctttgtactgaccgaggccagcactgacaccagtgcagacaaagaggtttgtagccaggggagtggagggacggacagctcagattttagctgacgatgattctcatggcctgtgtacaagttcccactaatgtatcatcagtaccagcatctctgaggaagatgtttttcccactgtgcacaatgcaacatcactgtccccagggtacatgggacagaaaaatccctgttagaactgggcacaaaactgcgcttctgaacatttcaggatatgatcctttcaggatactgtgtctagcacccaaattttgaggactcaagttttcattaaagcaacaggcagtgatgatgatgtgctttccaaatgcaaattgtaggaacatttaattaaatgggacccttaggagcagtaaccattctcagatcccagttaacctggtgtattagaatgtctcagcagtggaaggaattcatgcctgggctttggtgatgcttctcaaacagagcatctggcactgttcgtggaaaaaggtgatttcaacttgaagcagaaagataaggtggcgctttgtagaatgtaaaaaagtctaaccctagcttctgcagagagctgggctgctgcaccaattatgttgtgtggcattttacttccaaagggcagctttggtcatggaggagaagacaaaagcgtggtgcagttttttggggatttttttttttgacagcaagagagatgagatacaatttgtatttttgaactctgctttcagataactttataaagggctttaaaactgtctttgtaaatgatccagaagagttaggctctaaagaagttttgaaatacctcattctatttgtgctgctttttatcctttctaaaaaaacaaaaagattattagatggtaggaaactatgtctaaataaacccagtgagttgttacatttttattcatttaaaatattaaaatgacaataagagaggtttttagttatcagagcatgttgcagaggtataagaggaagcagagagtactgttttctagattaactgctctacacagaaatgaacagcagtatagattaacccataagagtccaaataactccccctgcttgaagctttatatggtgatctgtggtagaatgtccctcctctggttatgcttttctttggctaatagtatcatttgtctccccacctctcctgtaggactgaggtgccgttgtggggacataacgcagaagcgttgccacaggataaagacagcactcgacatataataaaaatcaatatggataagacacctattacacagataatcccatatgaaataaattaaacccgttttacagatggattaattgttttgtccttgttctgttgacttccagaccttgttatctctcctgttttcctggatcatattgtctctcaaatatcaatagcacagtttttggctgtgttgttttcaaacagcctacttttggggaaccacgaggacgtagtggcaggactaaaggtcaaggtcacttcagtgttctcccaaatcccgctggcataggctctttccttgtctgctttgtctgcaggattcagcaccaagagctctcaagagcaaatccacaggcagctaaatcaagaaggtggctctcttccctcctctttgctcccctcttcctgcagagatgcaagatggctttgaaatgtccctatcttccttcccttctgattgccttacttgttcagatgcttccatcctgaacattttctagagtcccctgcctagtcgccctggaaagtacccagggaagccacttacggcctatccatcaaagcacagtgcgtgtctcctttctcagacagaggacgtaatcatccatgcccacagaggagagcgtgtgccctgagtttcagtgccggatcagagactggaaaagtctgtatgccccctccctaccttacagtcttttacttctccacctggggaaaacagcagatggaggagaggaaagagaagtttagctggcatcattaaaatgactttctagtctcctgcgagctttctctcaagtagattctgctgagttctgcttggactggtaagcacagagagtgagtcatagagtggccctctagaatcctccagcctgtgcttattatgcagcatggaggtgtcctggctagaacagggcctctaatttatcatgtcttctcactaggtgaggtgaatagggctccacaaaccaccgtggggaccagtggcatcaaattctggtgccaaaaaaggaagttccatcacagacaaggagtgagaagaagccagggtagaaacaagcgacccctgcttccatgtgaagcttcattccccaacccattcttcagacagagaaagggtgcacacgcagacccgcaagcacagccttcgcacgtgtgctcacacagccgcagtatttacggcactcacgacgtgtccagcttctttgtgcgctcacagcaggcactgcactgtccgtggttacccttagggtggcgctgtttattggcgcctttttgcttggcacattctggttcctctgcatggagtctcctttctctttcccctacccaggggatctggcaaactcgtgttgctccatgtagagtcagctcagaggtcccttcctctcagaagccatctctgcctccacctacctccaacacaagagtttgctaacaggtccacactgtgtttagcactgtcaccttgcatcattttttggtgtgattgtatctgttgcacatacacctgtgtccccgctacacactttgagaggtaaagctcatcttttcgttgtatacagcacatgtacagaaatatgtgcctggcacataaaggcaattagtagatatttgttgaatgaatgagtgaataaatcattttttggggtagaagtggtgtagaatatctgactactacatgtggatactaagaactaattgttgttgtggagtaaaatttcttgtgtttgtctgtatatatataattttttttttttttgagatgaattctcactctgttgcccaggctggattgcagtggcacaatcttggctcactgcaacctccacctcctaggttcaagtgattctcctgcctcagtctcccaaatagcttgggttacaggtacgtgccaccatgcctggctaatttttgtatttttagtaaagtagggggtttctccatgttggccaggctggtctcaaactcctcacctcaggtggtccacccaccttggcctcccaaagtgctgggattacagacatgagccacagtgcctggcctcttgttacaattattgttgtctttctatcaaaaacattaccaaaatctccttttacttcataacactcataagactccatctatagaattccttttctggtagaagtgctcccttgttgggcctggcatcttatgggctcacccttatattctcccaagagaagtccccatttttcagtggaagagatctagctatgtctatggtttcctggtggcgggggctggtccacagacctagaatgagttgctggggaattgggtagggtgagccctttgcattgctgggtagaagaaaatttgacctgggcgcagtcatcagtttggactctaacttcctagctagttctgtgtgtgtcaaaatcctccagcataacatttgccatgatgagcaaggaagtgtagtgttttttcccctcagcgaaatgttaaaaggcaaaaaggctatttctgctcacccagaaaaacattttggctctagcagaaaacaaaacaaaaaaaacttacagccttaaaactaaaaagaggcattgaaatacagtaccttctccccacgctgttcaaaacacttcgtgagcaagcacatgtagcacatgtaggagagaggccgagtatgttctgaactaatattttagtgtattatttaaaatctggccagagcacagcatatttgcatgcctgtctttgggctctgtttctaaaacaaggagagtggtgatgaaatccgcagctggtgtgctggccccaagcctgggcagtttgggctccatcacaccctggagcagccagcaaagttgctggagccgctgatgggaggtgcctttggggtgggcagagttgtggagtcctctcctttctctgtagtcaacacacgagagtcaacatggaacttgaggtctgtgagcgtttgctgagcctgtgaccaggaggtgctcctggagaatgaaagcgggtaggtaggagacaagtggtatccagctcccagggactcacaaggagccctaatgaaacaacatggttctttcttaagtggacccatttctcccattactccttcaaacctctgggtttcccctgaccaaaaaacaggcatccagggtgtatcctgccactgtgcagtgccctgctttggttagacagtgcccatgtgaacatgaagttttccttctgacaggcggcagtcttctcaggctagaagagtagacagagcttccacctgtgtacaaggggcgtctgccgtcctcatgctactaatgcccaaccagatgaagggtgtgtgtgtttgtgtgtgtgtgtgtgcatgtgtgcaaatccttaaataggtataggcatatgtagtcagtcttcattatttgtggtttctgtatttgggaatttgcctatttgctaaaatgtatttgtagcccccaaatcaatactcacggcacctttgaagacatgtgcagggtggggaaacatttgagttgcctgaagtgcctgttcccagctgaggtcaaacaaggtgaccttggccgggcgcggtggctcacacctgtaatcttagcacttcgggaggccgaggcgggcggatcatgggatcaggagatcgaaaccatcctggctaacacagtgaaactccatctctactaaaaatacaaaaaattagccgagcatggtggcaggtgcctgtagtcccagctactcgggaggctgaggcaggacaatggggtgaacccgggaggcggagcttgcagtgagccgaggtcgtgccactgcactccagcctgggtgacagagcgagactccatctcaaaaaaaaaaaaaaaaaaaaaaaaaaaagcaacctcttccttcttgtttcagctctcatgctgtaaacaagtatcctttttgttgtctatttgatgtcatattcttccatgtttttgtgcttttgttgatgattttactgtttgaaaaggccccaagcacagtgctgaagagctgtctagtgttcctaagcacaggacacctgtgatttgccttacagagaaaatatgtgtgttaaagaagcttcatgcaggcatgagttacagcattgtttgccatgagctccatgttaatgaatcaaagatatacattaaataaggtttgtttaaacagaaacacacttaacacaaggttatgtggtgatgagttgatgaaaatgttgtgaacagaggctcgcaggaacctaaccctgtatttcccctagcagcagtggctccgtattcagcagtggctccgtattcaacagttcagtgtttgtggagactttctagaacataactgcagtttgagtatccctgatcagaaatgcttgggaccagaagtgttttggatcttggatttttttttatgagtttggaatatttgcattatattccttaccaatgagcatttcctttgagcgtcatgttggcgctcaaaaaactaaggattttggagcatttcagattttggatttttggatgagggatgctcaacctatatcttggataatgagaattgactatataaaggggtgagggagagggttttatgtagagctctatacctatgataccatattggaaaacgtctaccatatttgaagtcgtatggagaagtctccattaagagattataccttcagacaggtggctgcgctgggttgggaggtggatatgggagatgagggtgctgacatgaaccaaggtggtatggtctgaatgtttgtgtgaatcctaacccaaggtgggttagatttcaacagaactcgaataggtcatgatggaggagcccccatgatggggttagtacccttataaaagaggccccagagaggtgcctcgccctctccatgacgtgagggtacacctaggacatgccatctgtgaaccagaaagtggccttccaacagacaccaaatcttctggtggcaccttcttttggacttctagactccagaactgtgagaagtaaatttctgttgtttataagccacccaggctgttgtattgttacaggacctcaaacagactgaggctcaaggcaccagggaaacgtgctgaccgatcgatcttcagtacggtggatttattagaaagggtgctgcagtgatgagcccttgtcctccaggtcaggacagaggcccagggaatgcccttgcgtggcctctggtgtggttcctggtgctgcctcggtcctccaggtttgactgtggatgaactgcccctctgtccacacatacatagaaaaggacagtggggccgggcatggtggctcatgcctgtaatcccagcactttgggaggccgaggcaggcggatcacctgaggtcaggggttcgagaccatcctggccaatatagtgaagccccgtctctactaaatatacaaaaatcagctaagcatggtggcatgcacttgtagtcccagctactagggaggcaggagaatcgcttgaacccgggaggcagaggttgcagtgagccgagatcacgccattgcactccagtctggcaacagagcaagactccgtctcaaaaagaaaagaaaagggcaacgggcagtgccctggggcaggggaactgaggcaaaagggtggggattgcaacccctctgctctctcatttcccagagaagaagtggtcttggatatccaaggaacgaatgaattctcaggtgcctgctcctcccaggcacttcacactggatgtctttgaacttgacggcagccctctgagataccattatctccattctgctgatgaagagcaggcacagcgaggttacctgcattgtcagaggacacacagctagtaaggggtggaatttaaattcaaacctgtgacaagtcaagatacaattatctttagttggtggctgactggaaaaacagatgcaacagcaggaagaaggggggctgaagctggtgtattgtctgagtgtctaaaatcatggtgcgtttgaagggaatgaagttgagtgagcgattgcaggattcgagggcgagttagggcagagcttctcaacctgggtgcttttgcacctcatgacgtttggcagtgtctggattcatttttggttgctgtcataacagggttggaacacaggggaagtgctactggcatctagtggggagaggctgcggatgctgtcaagcctccatcggtgcacaggaccggcatccacaacaaagaattatccaaccccaaatgtcaataatgccaagcctgagaatacctgattaaggggaaagcaggctctcgaagtggtttgagttgggagcatgttatgggctgaaaagttacaaactatatccagaaacttctataaaggtatttccttctgatgtgccatcattcctggctcaaaattcacttttctttctacattttctatattcagtaagatatgacctgtctgtgagccaggcctattggtacctgttctgtggtgagcaggcaccagtaggtgacaaggcaggcaagagagagtgtccctggacctaagaaaccaggctgtggacccaaagccatctggaaaagactcacgggatgtgggacatcactcaaggctcaaggtcagcctggggtccaacagtaaggataagaaccaggacagcaggttccagaaagccaggtcccttcataggaggtcagcctgacctaaacggacaccattttcattattgttattattattattattattattattattattatttctctaagccttcttagcatttgcagtgtatcctgggggaacttgcagttttcagagacagactcatgaataaaaatgagttgtgtaaattcctgtattgagagtatttgccaagtgctgcagggctccagaggaggcaacgggcaccttggcctggagaaacagaggagggtgaaggtttctgggtgagtcactgctggaaactagaaggtgaagggagagtccaggcagagggaagagcgtggtgggaggtaaaaggtgccagcgggcagagccaggcagggtaggcgtgtgctgtgggcagggcagggaggcgggaggtggggtgaggggaagaccacagggaactccccagggagcagagaattgggtgcctcctgcaagtgtccactgtggcttctagggaaaatctctccgaaagaggaaagatgtgctgtgctggcaggaaggcggagacattcatttccagtccctctgtgatagggtaggggtgaccctgtcttcaagaggtgtgatgaagccagtgtccccatttagcatcaaaatagacaagacagttccttcattaagaaagcaaatcttgctggcactagataccctttacagagggccaggctctgggagcctccctgtctgggttcccatcccagcttctggggttcctctgtgtgcagtctggggtagttaacttaatttctctgtactgcagttcctatctgtaaaatgagtagaataagtgttcctgcatcataggtgttttatgagattaaatgatttagtgcaaataaagtgcctggaatggtgcctagaatatagtaaattctcagagttaaccagtgttattctctttttaccatttagggaaggcagaggaaagggctttaagagtgtcatgttctagagctgaacttgtgaactggtacctaggtgtgctgcaattggctgacaggtgcgcattttaaaaaattgaatttgaatcctttgcctggagctggcatgatccatgattcatcatagtccatcctccaccccacccccttgtcccaagcctgtccagcaacacacatgcagtgtcccctgcagttggctccctaaacatgagagcagaggacactggcgattgcattaagcggacagaagttacaggaggaaccattggcaggattagccacagactgagtcagctgtcatgccacacacttggtgagagccctgcttatgaagcagctgtgtatttcaaatgttgggttcagcctaggagcttgttgatgatcactttctgtggcagcaggttctagggccaggggggcaccctgccagcttctgtctccagcagacaagctgcatccaggtacaaccttcctctcagcctgtcagacgtgcgtctgcactgctagcacagcctcctccttcctacgcctccacctgacctgttcctataactatgagattgccccttacagccacccagtggtggacgctccaaggcaggcaagaggagcagcctactttccctagcacacaccagcctgaagagctgtgctagtggtggagtgaggaaagaaccctggccccagaggtaaaagacctcactgaagtgtgaccttggtcagatcactgagccctgcagtcctctttgttgtctataacccctggggtactgtattgcttgcagcacctcacttgattattgggttgttagagagaggcagtgtgtgtagaggtgccttattattattatttttaatgttagatactctgcaaatgatggacattcaaaataattagcaatgctgcattatttcttgaagtgtggccaaccatccacagcctgggctagaaagcagaaatggggatgttgattgtgatgagggtcccaaactgtactggggagaagatagatggaagcaaagaaactctatacacagagaatttcaaagagttagtaccaaaaaaagactgtaaaatatcttaataacttttgtattgaccatgcattgaaatgacacttcagatattttggattaaatattaaatattattaaaattaattttgcatgtttctacttttaaatgtagctactttattttttttaacatagtagaaaatgtacagcgtattttactttagaccagctacattgcaagtgctcactagtcacatgtggctgtcattggacaacacagctgtagccatgtaccaattgcattctgtacgtgccattgggcttcgagactttttcctccttctccttggagtagcctcaactctatcggggaatccacgttgggcaccagatatcggggaatctgccccgatattcacgtaggttcttttctattttccttaagtgccggccagcttgagaaataaagggacagagtacaaaagagagaaattttaaagttgggcgtccgggggagacatcacatgttggtaggttccgtgatgccccacaagccgcaaaaaccagcaagtttttattagggagtttcaaaaggggagggagtgtgcaaataggtgtgggtcacagacatcaagtactttacaaggtaatagaatatcacaaggcaaagggaggcagggcgagatcacaggaccacaggaccggggcgaaattaaaattgctactgaagtttcaggcaccactgtcattgagaacatcttatcaggagacagggttttgagatcaaccagtctgaccaaaatttattaggtgggaatttcctcttcctgataatcctgacagtgttctggaactagataggggtgatagttgtgaaacactgtgaaagtaccacagtgtcactagtggtaaatttttgctacatgtcatgaatgattggatggatggatacatggattgtgcaaaaacgtactgcctgaggttttgtcagtgcaatgagaccagcaatcaattcctcattgccacctggggggtgacatgcactggtcttccctacattatgatgacccaagagcttcagcctcatgttgctgaccctcctttctgtatcctcatggctcattgagagaagcgaaggagctgtctgaggatgttgtgatacgttccaagttgtcggtaacacacttagaggtgatatctcctggcagctgcagagaaagccagttcagtcagtttggggttattagggaggaaggggaaaaatggtgagaatgtgctctaggaaagtggggttctcagacatggaaaaccaaatatgtcatgttctcacttctaagtaggagctaagctatgaggacataaaggcatagagtgatataacgaactttggcaactggagtgtggggacattgggaggtgggtgagggataaaggactacatattgggtagaatgtacactgcttgggtgatgggtgcactaaaatctcagacaccaccactaaagagctaatccaaaaaacacctgtaccccaaaaactatcaaaagtttttattttggacaatagcgtcctaagatacctcgacaaagaaaaatcagagaaggtcttttgcaagcaaaccttattagaaatactttttaatggttgagattaaaaacatatttcctaaatgatcctcccaggaaactctgaagttcttgaggacaaagaccttggctatcttgctaatgttgtctccctgaaccttgcatgggtccaggcactgagtaggcactcagtaaacacagagtattgactcagatcctgaatattgaaataattgattattgaatcagataattttccaaacaaaatgaataccaccctgtgcttcttgtttgttttctcccatcacccatttctggggagtttttcaggtttcgcaggtagacctaggactaggaacattgctaaaggtcattgaccaaagacagaacttcagtcagttactggaggtcttttcccccctgtaaatgataggccatcctgcggtaccctcccttctcactgctgtttaggaaaatggattatttctgattcagacatttccagtcctttaattctttctttctcagtgaactaagctcttttactcttcagtgaaaatggcactgtgcacaagtgtctggcatccacgcaaggaaaaagctttctgtgaacatgtggccttttagattgaaggcagtgatctttagagttcttaattacccaagccaccaactcatctaagccctggtccatactgcaaagaggagggaaggatttggatgtcagtttaagccttggcgtctgttctgtattcagggctcatagtacaaatgtgttacttttttcccccctcagtggaatgtatttttcttacttttccctctctaaaacatgcatgtgccttagaattttcccattggagtttatttattaacccaggtttacctttttattatatgttaatgattttactaagtagatagattaaactaaacttataaattattaatggattcatatatgaatactactgttaggaacaggagtctcacaaaggttcaaactttccacgtatcagtatcatctagttcaagggtcagcgaactatggcccacgggccaaatcctattgaccatatctggccctttacagaaaaagtttgccaacctctggtctagttcaacacttagcataagctactgctcatacctaccctattttggcctgtgttctggcactgattgattactaaaattggtttgccattctcaattctcttcacttgtactaactatcatttatgacttcagacctgctagttaacttctctgagatacaggtacctcatttgcaaaaaggggacataatgcagttttcatcattaagcatcaagcgagtttacatatacgggtttagtaccccttagccccaaaaagcttgggaccagaagtgtttctaatttttttttttaattttggaatatgtgcatgtgcatgatgagatatttgggggataggacccaagcctcaacatgaagttcttttgtttcatatacaccttatgcacatagcttgaaggtaatttgatacaatagtctaactaattttgtgcatggaacaaagtgctgactgcagtttgactgcaactcatcacgtgaggtgaagtgtggaattctccacttggcagtactcaaaaagtttcagattttggagcattttggatttcagactggggatgctcaacctgtataaataaccttagcgtgttgtctggcagttagcagaacctttcttctttctacctcttccctaaagggtatgaccatttatccacggaaaaaaaaattgaatggcactgccgtgtagaagtaaatttgctgtcacttatcctgggtttaaatcactgttctgccacttactagctatgtgaccttgagcaagaggctttatctcattaaacctcctctaaaaccagagataataatagtatctatgtcctaagtacaactgtgactcttcggtatacaatgcatgtcaagtgcttagcgtaatgccttgcacccagtatatactaattaaatggtagcatctattattgtcatcagtgttattagtaatttcttagggtgtacaaactattggtgaggatcatggcattcatcagctctacccacatttgccaacatcaactctcctagtcagccaaaacttttgccactgagcttcacttaagcaagcaaagaaaacatgttttcctggggaaaatgaatctagagcttcaccatccgcatttggtgcattagaaatattccaaaaggaaaagcaacagagaggctggatttgcacatttctttcaaactgctgcctgattcccttcactcttcctgactgcattgttaacaagtcctctcggcctcagctgtccctgtgtgactacagtagtgccactcacatttctcaggggttggtgtggggagaggcctcgctgccccggtggagctgcccaagggacatccattcattggtttgcttctttattcattcgcttcaaatttattttactgtgctgggtgtagaggtaacacaggatattaatacctagccttttcgttaaggggctcaccatcttggaccccagttttgaagatactggagaggcaagagtttgggggctgggaaatctgagagtttaaaaaaaaaaatccaagcaaagatggtgaatggattcgtagggtgatagaggggagaagggggtactcagctggccagggatgaagctttagttggtatgaagtttctaagctcattcctgttctgagtgggtcctttctaaacataactcctcgactataaatcccttttactccagggatcattccataagaagcgtagccctggctggctttgcagttttctccctcacaccatgcagctattattgggcacggagcaggctgtatgcactaggaagtgagtgtgtctcttggtgccctggtgccccttgaacaaacacagtcccaggaacaactggacttctgtgcaagctgaacttctgtttctacttctgtgcaagctgaacaaaggcaccagcctacttttcccaggtccgggaaagactccagtgcaccgtgatgctgaagacggaggtgcttcccttggccttgggtccaggtgaccataattcatgtgcagaaactggcatgaccctttatagaacagtagattccactggggcgaaattactggcagctgtgcttttcttgtcaaacactggcttgggagagccaaaaatagatggtcctgggaccagtctgggttcaggaagtggcatgagcaagttgcctcccccttagggagagtgtgccacattcctcagagtgacaggcagcctgggagggcaaagagcagggcagtggccaggctggggtgggatgattcggatgcctggccttccggctgccatggtccttctcccaccagccagaccctccttgctctgccagccaggggctcccatttctccctgctcctttgtgccatggctcacctctgactatgacacttcttgctcagaaagctccatgggacatcatcgctgggcaaagaaagtgtaaactcgtcctgtgaggcccctcggaatccgcgcgtatctcatctcatctctctttagactccgcttcatgccctttatgctccagccactccagactccagcttgacattcccccaaaatgcccacgttttcccacctcatggctttttcctctagttcttcccatcctgcagagtgcttcctacctgtgcgcattccataagtccttcaaggaccagctcacattatgtatggtgatcgtaacatttatcatctaaacaaggattttttcggaaaaaatttcacaaactacccctccctttgggccgtgaggtcatgcagtcacccaatccgaaaaccctttacaaagaggactgtatccctccttgtctggctctctcaattttttcttgttggaaaggttgtcacagatccccctgccacagagtgtggacatcagggtagacacttagtttctgctccaggttctaagctccctgagaacagacacagtgcccagtgagtcttgtccccttaccagtggcatgtacaacccgttgcccaaagttgatgcccatggaccctcaaagcagctgcttgctggtgagcacgctttgatgctgcatggctgcatgcttacatgccttcttctgtccccagcaccacttgttgaagttatgcacatcattgcaggagaggggcgtgcccacagctgcaaagtccttggcgtgcaaggtgaggactctgcttcagccagcatgccagattctggccctcaggcagctgcccaaagagctcttgccaatgccgtggctcttgctaatatttgatgattgtcagagagggaccacctatgggtcatgccggccacacattcctttaggcaagaaacccagagtgtggcttcttattttgcatcaagttaagtcacttagcaatcagggcagggccctagttttaagatggcttagcccacactggagtgtctagttaagtaacaggttcacagtccagccttggctctggggagggcttgtaggcgaaagagttgtagtttctttcgacaaatctgcatttgctataagagctaattaaagattcctttaagggttcataagattgatctccagttaagcagtattttcaactctttttcttccttagctggagaatccttggttcaaacaacatcttgggtggacattccaaaatgagaaacaaccaagtcaagcttttctgggcaaaagcagtgttagggcttgaagttctgtgcccttgccacgggctccctctatagagtttctgagaaaacaccttgaaaatcactgctctagagtttaataaggaagatgcgtgtcctggaatcacaagtgatttgagttgctgacaagtgatttgagtgaagcacaggctaagatgggtgggaggacaggtgttgcacaccagccctacaggaggtgtttaatggatgctggtgggtggggagctgcacgggcttgcccaaggccactcagctccattataagtctcccaagcccaggcctgtgaattacacccagcaaggggatcaggaccctctccagggatgccttccctgcatcacctccaccccaaactcccaggaactgagggagtctgtccctttacggaatggcagcccctgcttgggctatgggagcagcagtaagagactgacctcatccaaagtggatgatcctctccaggtatcccttggtcttatttccattaagctggagatgggagtagtcagaagtagcagtcacattttaacaagctatgttttacaagatacacttgacctttgctgtagtgatcaataactgagcatgtaccctatgccaggcatggccctatatgctgtgcacacacacattatctcatttcatttttacagcgttcccactttataaaggctgttccaattaagaattttaacaagaaggcttggtgcatttcttgcatctttttgttaaagtatgaccctgagaattacccgagtgggaggctatttatttctagagaagttctctctggcatccccaggaggagagccaggtccatatcctttatccccatcccttgtttggcctgatggagggtgtctggccctacctaaacgagccttggaaggtttcacttcaattccaacttaatctttaattgactgtcccggacagattgagaactgaaatccatcagaacgaagcatgaggctgaatttctcctgagagctcagctcacttttacaagtaaattacttacatcttccttgaggcagtaaaagcgcatttgtttggttgtggtgtggggaggccacggggactgtaactctgtgaaaatcagtgtttaaaatgtgtgacaaaaagcaataaaatcatgttgatcggcatacaagagatcaacgtggaatgtgccctggtagcagaaacagggtggaggaaagttggaattcacaaacatgtttatagatctctggttttctaagtccagttagaagatattcaacccatgtcacattcctggaccataacattgctctgatgttgatctagaagctgccatctattgtacagttgaatccgtctatggtaactaggctaatcaatcaaggaggaaaatcaagacagggagcttgtgagagtggatgtggtttctggtcacaaggcttccaggtcagcgctgtacctctgaccctccccaaccaaacaagggttctgtttatccagaccagggggccaccaggtcagatttgcagtcggttattcccactgaggagaggggtttgtgctttcctgtttaattgcttgtctggccaagccatgagttgcagggtccacctctttgttggccttttccaggaggcggtagtgggaactcagtgcgatgacataaatcctctttccagactattactcaaggtttgaagggagataaagttaaatttaacctcccgcttcagctattttcacaagaaaaataaaaatttaaagcagatttcctggtgattccatcatctttcttatcggagatttacaaataattctaaaagttgagaatttctgcaaagtctggatacccttgaacctttttcctgagagataagatgatgtatttatgcacatacattcagataagaggttccaaatgtttctgcttaaacctcatcggtaaaggttgtgataagtaccaacaatactttatcaattttatacttgtattctttgataacatagaaggcatattataaaataatcaaacgtacataaaaagaggagataaaggtgaaataaacagtattgtaaaatgtcttactagccctgatggctttatactgtcatcggctgatatctcaagacatagagatatttagagtcacttagagtgacatttattattaatgattttgagtataaatccatatttccagttattttatccatcatttcacatttgtttgctgaattgtcattgcttttcaactttatggtagggctgacaaaagcttttactaggggaatgagaggccctgccattttttggtgttgtgtttgtattattatcttcaactcacacttttttttgcagtaatctttttttaagtgaaattttttcttaagtagatcatacatagagagaagcacataagtgcttcatctcagatcataagtgaacaacatgaattttcacaaaatttacacactcatatgaccaccacccagatcaagggatagaacattcccaaagcccccatcgtggctctccaagtcactcccaccctcttctttcccaaagtaacgcccaaagtaacctctcttttgatatctgttaccttttattacttttgcctgtgtttgagctttatgtgaatgaaatgatggcatctattctctggtgtctggctgcttttgcagtacattctctttgttggattgatccatgttgtcacatgtagttgtagtttattctgtttaagtgcagcactccattctgtgacagccccgtttcattattccttctactattgagggcatttgtgtagtgtccagtttgtggctatcatgaatagtgtctctgtgagcattactgtccctgggttttggtgaacatatgcccacatttatgtgggatgcgcacctaggagtggaattgctgagtcatgaggtatgttcattgttagtaatactgcccaaaagtgtcagtgtacgtttcctaatgagcacgggttgaggagcagttccacgctcaccaacacttggtattagtgtcgtctttttagctttagctgttctggtggatactgtcagcatggtccttacgtcagacaatggggtccctcaggccctgtgtcacagagggccctgcactagtgctcctcaggagtgtgccagttctggagggtggttgcttgcaaagggccacaggaccacttccagggcctgcttgtcctgcagaaggtggcctgaaggggtggccaagagatgcttctcatcagagacaggacggaaggaggaatgagtgcacggagctggttcctgtgggcttcctagtctacgtgtaggtgggggaggccttcgaggagcaggatggagccctgggttgggggaagagggtgccatgaccagggtatggctctcccccttgtaacaggcttccagtgccaaggaggctgggaattccacatttggatctggtcctctgagtttacattcccttgaggagcgtgacaaggtgaaaccagtggaggtgggctctgggagcacctggtgggcagaggctgagtggcatggctttttgagagatgagggagtacctgctagccaccatgctcggcctatatttgccctttcctcggctactgtccaggtaggggtgtgatggtgggcaagcagctgagcctgggtcagggggtaaagagcctccctggcttcctggggaagaggacaaaaggtgggtgttcaccccatgggattccggggagataagattagggagatggggaagtggctgtgggtgcctattggcagcaggatcctttccttccatccttgcctgcctcctagagctcactgtcccaaagaaaggtagtatgagtgacaggtgtcattttaattctctagtagccatttttttttaaagtatgcagaaagaagtaaaattcattttatgttgacctaatagagccaaaatataatttcagtaagtgatcaatgtgaacattactagtgagacgtttacattcttttaaaaaaaaaaaaaaactaggtttcaaaatcagatgtgggttgacacttccagcgcacctcagttcagaccagctgcattggttaacctcctggacagggcagccccagaggggatcatggcctttggtgcgaaatgaagttaatttgggtttgtactctccatagctatttaatatgaactgttgctttttcatagttttgattttgttatgaagatatatttgtaaaaataggaagatagaacatattttaagtttgttaggttgaatttaaacttttaatgtcaaggcatatggggagaagggtatctccatttgtacctttgcccataaattctggtagctgtcagcggtcaagagagaggaaggttggtggtggccatggtcagatgctgtccatctcagtgtatccaggcagggacacaggcaaggaccatttcttactcatctttggggcttcacagccccaaagattctttgcaacctgagcagaagttgctttttatcgcttacagatttgacattttctaggaaggtgatgcaggttttaaaaaccgtatagttgagaagagtggcagcaataatcagataataagggaacaaaacccagttctttgcgttgtgtcggtaggtgccacatgaagggggagcatacatctgcctttttttcccccatattcctagagcctagtgttcagtaggtgctaatgaattaacttgtttattcaacacgtatttactgaacacctatcatgtgtcaggtgtcaagtgatgtattatgctctggggatacaacggtgaacaagacaaagttcttgctctcttggaatttatgtattattgatgagaagcctgttttgttaataataaagtcaggcacagtggctcatgcctgtaatcccagcactttgggagcctgaggcaggtggatcacctgaggtcaggagttcgagaccagcctagccaacatcatgaaactccgtctctactagaagctacaaaaattagccgggtgtggtggcgggcacctgtaaccccagctgctagggaggctgaggcagggggagttgcttgaacccaggaggcggaggttgcagtgagctgagatggcgccactgcactccagcctgggcgacagagcgagactttgtctaaaaaaaaaaaaaaaaagataataataattaattgtggtcgcagctcaaatgacattctgacatttgatggattctcaaagagctcagaagaaaaatagcagttttcctgagtcttaaaagatataatcagtcagcaggcacaagggatatttaaatacctaaaggaggggtcctcgtggccacgtggaggatgtgggatttgccggcaaaggattaagggaatccattcaagaacacttgtgtcaaatttattttgacttacaaacccatgtctgtaccattctttgtcacctgacagataattgtgttttatcacttacagatgcaggcttttctaggggctgatagcaaggagatatacttttgaaaaatggcgtagggttgggtgcggtggtgcacgcctataattctagcacttgggcaggccaaggcggctggatcgcttgagctcaggagtttaagaccagcctgggcaatgtggcgaaacctcgtctctacaaaaaaaataagccgggcatggtggggggaggaggaggctgcagtgagccgtgattgcaccactgcactccagcctgggtgacagagtgaggccctgtcgcaatcaatcaataaagacatagatgagaagtgtagcatcattaatgaaataacaagtgaacgtaataaattaacatttaaaaataaaactaattttatttttaaatgttattttattttatttaaagaaattaaaaattcagtgagcccaaggaaaacttgattacatgggatggttcagcatgagacacgataaaaaggaaacgtgcagatcaattagtaaaataatcaaaatcctgtgggtccttttcagtggtttttgaacttgaggggaataagaatcacctggagggcttgttccaccacagattgctggtcactgtgcttatagtttgtaataactctaaggtggagcctgaaaatttgcagtcctaacaagttcccaggtgatgctgatgctgctggtccaggaaccaggctttgaaaattcacaggtttatttcattgcatcactcatatatgcacacaacagctttatgcttcagtttcatacagttaacgcaaggacagaccataaatcctactaatgcagagcgaggtaggatacagtccaatcatggctgcaaaaagaatgaggggaaaagcacatcaactatgtgtacagttttcatctctctctcatacttaacttggtgtccttgactagtttggccagtctcttgtgtctccttgtggggatatcaaaattaggctctccgtaacctgactcttcttgaattggttcatctcctgacactgcccttttcctgcagaaactacagggaccatcactcgcagataagcccattgctgtttattccactgtgccttcgcataagtgtcctctattaacctgccgcaaatgtgtgttcttgcttaggaccccactcagctgccacctcctctttaggctcttgtcttctctatcttccctgttccatcttctttctgtaccttatatggactcctgctgcagcccttaacgtactgtattataatctgtaacatacatagtccccttcctatcgtgtgagcaactctggggcatcagccttaccttctgcagttttgtggcccccgtttccagcccacatgtgagcagatacttatggattgtatgtccgtagtaaatatggattgcgtgattgaatgatttagtaaaaaacattccagatctctcagtctataaaaatgaataggatgcaatcacaaccaataacaagaacatagagggctcaaataactgatatttggaaaagagttgcagagtcatggtacaaataagaccataatgagaagtcctgagctttccattacctcgttgctctgcatcacaggcaagtccacatttggctctacttagattaatcatttcgtggaagaaccaaagtattatttagctactaataaaaagcaatttgctgataccaactcagggacatgaatatcacaaaatagttatccataagcatctgtcatctccattatattttagtcacagtgatagattatcaaatgaattagaggacagaattagtctgaatcctcagttctaacataatcacttggggaaatatttgccaagagagtagaaagattatgagaatgaaaacttcttccatttgccttgaaaagattagctgtagaatcctaatcatctagaatatttcaaaatccactgtcagatgacccatgagctcagtccatgtagtgtattttcaaatgcattgcttaccacttctatccttcgcataccatagatttttaaaatgatggcgggagggcggaagagatggtgctttaagatgagggaaatgggcagtttttttctttggaggcagtcactgaatagtgggactatttacaatgtagggcacggaaaggcagcatttattttgaagaaatgtcagagctagagttttgtgaaattgcttttaatagatttttgttcttctttctcatgcaactttgccagaattaaagcaatgctcttatgacaagaggagcaccagggccactgtgggttctagcaaagaactggtgttacttagtgcctgctgttggctgcttctctgggaagcctggtttcctacatttcactctctcagcacacctccctcttgactctgaccatccttctcagactcctgaactggtttcatttcatctctcttcctcttgcctctgggtgtccttaaggcactgttcttaaccctcttgcctctgggtgttcctagggcactgttcttaacctccaacttcttccagtatatactcagttgtgtattaccaaatgcccctgggacgtttccacttagatgttcagcctcaagaaaaaaaaaaaaatccctatgttgagcacatctgcttgaaaccctcctgcctttccagatattttctctaatttggacataccatgatcagacccttcctgacgcatttgctgttgcctagaatgccccctgccatcccccattctagaatacagctcttaaactcaaatgcctccagaagcgaggagaggaatttgcatgtgtgttgctggctgggaatagggtgcaaaatggcagctgaccttggcctcagtgttgaggagcagtagagcccgtggggacagtgaagagctggggagctggtgcagcagcaaagcgggcacttcctactaagcaccaggccatccttgccatgtaggtgtgtgggcccagtgttaccagatttctttatttttaaaaagaatgcagggtatgtttgtttttaattgcctgattttggccaagtgcaatggctcacgcctgtaatcccaatactttgggaggctgaggtgggaggattgtttgagcccagaagttcgagaccagcctgggtagcatagtaagattctgtgtctacaaaaaaatcaaaaaattaggcagggtggtgtgcacctatggtcctagctactcaggaggctgaggtgggggatcacttgaacccaggagatctgcagtgagccatgatggcactactgcactctagtgtgggcaacagaacgaaaccatgtctcaaaaaaaaaaattgcccaattttatatgtgttaacagttgtttgaaattaaaatcaccttttaggctaacattgtgcagatcatacaaactgtgtctgttagtcctgtgtgggcctcagctgccagtgtacaatttctgatttagaacatctggctcagtgccatccagtagacatacgcaagacatttgagtgatctaaaattttctagtagccatgtttcaaaagttaaaagagaacagatgaaattaattttaatatttttaatttagtcaagatttcccaaatatcatttcaacatgtgtaaccaataagaaaaatcactaatgagagatttcacattctgtttttgcatgtaagtctttatgctttacaaaactaaacgcacatctcaatttagactagccgcatatgactagtggctgctgtcccgcgcagcccagctctggatgaggaacaagaattaattacatgcacatataatgaagtgggattttattcattatgcttgtgtagagctagataagttgaattgggggtaatccaaagtcaaagatagtaaatctgagaatggtgagtccaaatatgacaaaaagaaatagatagaaaagaattgctgggatggcaccagagtgataattgatagactttcataagtccatcgtgcatggcttccaataatcccttaagggacttttctctctggagctctaccctgtgccacaggagttcacagtttaagttctaatccatacttcaaggttagcttccattttggatttatcatgctgttgcccttctaaaaggcaaatgtcaaggtgagtgttttgtctataagcatttaaaacaaaatgagcatcaaggaagccactgtaaaatggggaggagtgttctgaactcattgaccacttcatcattcaatcaagacttagcaaatgcactacgctgctaacgatgagcacttccacccaatatttaccggctttcactgcacattcatactgggaagcagcgttctagagttattatcagctctgacctcgtgaaggttatgaccgccagtgactcctttcttgaccctgactacatgatttgtgtgtttccttactactgcatcgttgatatgctcaaggatctgttgagggttaaaacgggaagccagtgatccttctaaaccatgttagcatctccccgtagtaagatgtcaaccatctggcatgcagtattgtgtacatggatcattgtgctgtcgctaggcctctctttgcccagtaacagtcaagatgtggtcatttatgctcccttgctaccagaagggacacagcttctcaggactgtcagtcatacctgtttaactcctgtctaatgttctcagtgacagctttagcatcttggaagatacataccattagtgctctccaggagccaagggtcccaactctggtgagttaaggcaatggcacaattataatcctgggttgaactgtcaacattattggaaaggtcatcctagggctattgcagtggcatttccccatatctgaactctctggcatggatctgttgtgaaaaaagctgccaagtatgatgattttgagaaacaagagtctaaggaaccttgaagggaatccagggccccttataaagatggtcatttcttaagtcattaggtacaacctttctggcgtgtgtctagactcactggcttcagtaagcagcctccacttggtttcagccagtcttatctcctaagtacagcactgattgggagaagaggaagcagaaattctgcctttgtgcaagaaggagcttgcccacaattgtctctggatgcatactagtctttgtacgaattgcattagtacaaacatttcaaccaacacataaaatttcagttgtctttgttttgagccttccgaattcagaggaagtatttcatgctgatatatttagatgaaagagaaagttacagagcacttttggtttgaagttaccactccagacaccttaaatgaagatgaaatttgagaactaatttatagagataatgacttagagtagaaattgagagcaaatacttccttccttggaaatggctcagaaagtagatagtaaaacaaaggagagccaaatggaacttggttgggatgacatgggcatttcctcttttcatccacacatccattcttcagataaatatttattgattttatcatgatattccagacacttagaatgcaggcatagtgaagatccatttttgtttttaatttaatagacttggtccatggtagccagcctgcaagactagctcccagtaatcctcatttcctggtgtgcatacccctgtttggtcctctcccataatgaataaggctgacctgtataaccaataagataatatggaattaatgatttgtaactccaaggctagatcgtaaaagatgttgctgtttctaccctgctctcttggatcgcttgctctggagggaagctggtcaccatgttgtgaggacacctaagcaggctgtggaaaggaccgcatggagagctgagccttcctgccaacaaccagccccaactttccagccatgaaaagaagcccccttggaagcaggtcttccagccccaggcaagcctccggatgactgtggccctggctgatgtcttggttgcaacttcatcagagaccacagctagaaccacttaaattcctgacctataaaatttgcgtgacatgataaatgtttattgtattaagcctccgtgttttaagataatctattatgtagcaatacataactaatacatagtctttatgtgtgccaggctttgttttaaggcctttgcaaataataacccatgaatcctcataacaactcttcaaagtaggtactgttgttactctcattttatacatgtggaaactgaggcccagagattatatttactttttaaaattttgtctttttttttgtaaaaatgttttacttttaatttttatggatatatagagatgtttaaattactagcccaaagtcacagttggtaaaatgttgagctggaatttgaattgagcaagcagtctaccccttagcagaatctgctttttttaaatgaactaagcagcctggccagagtccatgccctcagcagctacgttgtgttgtccttaaggaggagcatgttttagaaaatcagttataaaatcaggtgattgatgaagtgcagggttaagttaagagaagagtgaactgccttcagaatccagtgctgttaccactcaagtggagatctcagataaatcacttattggagcttctgtacaatcatctgtaaaaccattacttcccacttggagagatttttgaggattaaatgagataatgcatgaaagccctctagcttgggcatcagtacacctgagttcccttcccttgctctgcacagcctgctcatcaccactgatggggaactctgtcctctgtagggcccctgcagacatgggccttgcctggatgctgctgctgtcggagcctaggagagttgtgcctggcatcgcagcacaggtactcacagctctcagaaggagactcctgtctgggaccctgccctcattcccacgtaggaaaaatcctttacatgagcatctcctggccttcattgttaggttgtagactacaatgaatgatattctgtgtttaattacattatgcacaacactctacagagtgggtggttttgaatcccaaccactaatttacgaagtggagcggctctgctggctctgtgaagtatgtgttgtggagccagaggtgatgctgttggatgtgggtggtgatttacgggagagcagcataagcagaggaaggcacagagacctgggttcaaatcccactgccagtgctatctgacgtgagacttcggacaagttatttaaccttaaggcttagtgtccttgcatgtaaaatacaaataatgctgacctcattgattccttgtgaggagcccatgggataatgtggggtaccatgcatcagtatcatttccctttcccttgataatgattatattggacagctagtgtcataggaagctaatggttaggaattcagactcacacaagaatagattttgttttgcagtggaaacttagtgataactttggactaagacaatgtgaagacattttggcagacaatcatagagtagttatattcttgtgaggtctgcagaagtccctagtggggagagcagacagagccttggatgctcagacctagtttggctgtgaaactgaagctttagtccttttaagtctgtgtttctgaccctggaggaaaaaagttatacataccttgaaagattttcttgaaaaaaaaaaaaaaaaaaacttgtacatgtctgtatacacaagatggaaaaaaaaaagttcataaagtataatatgaattcatgattaaaaacaagaaaatattacaaagcaatactcatagaaatttagacatagaaggtaacttccttattctgataaagaatgtctacaaaaatattcaagaaccaaacacatggttaatatcatacttaattgtgaacctttataataggaatgatttaaggatgctctcttttacctttttcatttactattacactggatgttctagctatacttaggcaggaaacaaaataagattagaaaagaacaaacaaaattgcccatatttgcagataagattatcaatgttaaaaaagagataattttaaaactatcagtattcagatttaacagctacaacatcagtgtacaaaaatcttagcatttctatagataagcaaaaataagtggcaaatgaaaattgtttaagaaagtaaatatttatgctagtaatcaaaaccataaggtatctaaggaaaaaatatgacaaagataagatctttatcaagaatattatacagctctattgaaaagcataaaataagatatttaaacaaagggtaaaatataccatattcatggatgggatgattcagtatcataaacatttttttttgcccaaatatacctgtaatttcacttccattgcaataaaaacaaaatagggattttcatgggggttggggactatataagataactctaaaagttcatgtggcaaagtagatgaccaagaataattaacataatttcgtgtaaggggatcatacaggagggaacttatcctgatagttatcaggattaaaaattatagtaattaatacatgtggtattggcacagggatatagaaatagatgttatttgaactgcctaatgtgctcaaaaaccaacccatacatatacagacagctaaatgagagcaacaacactacaattaatgaggaaaaatgattcatttaatgaatggtgcttaaactgttagcaaatgaaagggacaaaaagaatcagatccctactgcataccacagtataaatatatctagatggttaacatcctgagtatgaaaagccaaaaatttaaaatgtatagtgaaaaaacacaaaaaccctaagggaaactcttaatgtaatctaactggattgcattaaaattataaaaggacaccataaactaagttaaaagacaagagaggaagtcctagccagagcaattaggcaggagaaagaaataaaagtcttccaaatggaaaagaagtccagctgtctctcttcactcgtgatgtgactctacacctagaaaaccctaaagattccacccgaaggtccctggaaatgataaatgacttctgtaaagtttcaggatgcaaaatcaatgtacaaaaatcagtagcatttctatacacaaataacattcaagccaaaagccaaatcaagaatgcaataacatttacaatagctacatccacacccacacaaaatacccaggaatgcctctaaccgtggaggtgaaagatctctagaaggaaaactacaaaacactgctgaatgatgtcatagatgacacaaacaaatggaaaaacatcccatgctcatgaattggaagaatcaatattgttaaaatggtcatactgccaaaagcaatctgcagatccagcactattcctgtcaaactaccaacgtcatttttcacagaagtagaaaaacctattctaaaatttatatggaaccaataaagagcctgaatagccaaagcaatcctaagcaaaaagaccaaagctacagaggcatcacattacctgaatttaaactatgctataaagacataataaccaaaatgacatggtacttatacaaaaacagactacatagaccagtggagcagaatagagaaccaataaataaagctccacacctacagctctctgatcttcaacaaagttgacaaaaataagcaatgggtaaaggactccttattcaataaatggtgctgagatagctgatgagccatatgcggaagactgaaactggacccctatctttcaacatatacaaaaattaactcaagatggattaaatatttaaatgtaggagctcaaactataagaatcctagggaaagaaacctaggaaacaccactcagaatatcagccttgggaaataatttatggcaaagtcatcaaaagcaattgaaacaaaaacaaattaactaaagagcttctacataacaaaagaaactatcaatagagtaaacagccaacctacagaatgggagaaaatattttcaaactatgcattcgacaaaggtctgttatccaaaattaataagaaacttaattcattaagcaaaaaacaacctcattaaaaagtgggcaaggtcaggtgtggtggctcatgcctgtaatcccagcactttgggaggccaaggcaggcagatcacctgaggtcaggggttcgagaccaacgtagcccacatggtgaaatcccatctgtactaaaaatacaaaagtttgctggatgtggtggcgcacccctgtaatcccagctactcaggaggctgaggcacgagaatcacttgaccctgggaggctgaggttgcagcgtgccgagatcgagccattgcattctagcctgggtgacagagtgagactctgcctcaaaaataaaaaaaaaagtgggcaaaagacatgaacagacacttctcaaaagaatatgtacaagcaaccaacaaatatatgaaaaaatgctcagcatcactaattatcagaaaaatgcaaatcagaaccacaacgagataccatctcataccagtcagaatggctgttaccaaaagtcaaaaaacagcagacgctggcaaggctatggagaaaagggaatgcttatacactgttgctgggaatgtaaattagttcagccactgtggaaagcagtttgaagatttctcaaagaacttaagacagaactaccattcaactcaccaatcccattactgggtacatatccaaaagaaaagaaattgctctactaaaaagacacatgtacgtgtatattcattgtagcacgattcacaatagcaaagacatggactcagcctaggtgcccatcagcagtggattaggtaaagaaaatgtgcatatacatcatagaataccgagcagccgttagaaggaatgaagtcatgtcctttgtaggaacatggatgcagcgggaggccattatcctaagcaaattatgcaggaacagaaaatcaaataccacatgttcttttcttgtaagtacaagctaaacattgggtactcgtggacgtaaagtcggcaataatagacactggggactacagtgggggtagggtgtggggaaaagggtgaaaggctcttgggtactatgctctccacctgggtgatgggatcgttcataacccaaacctcagcatcacacaatagacctgtgtaacaaacatgcacatgtatatcctgaatctaaaataaaaattgaaattattttaaaaattaaaaaataaaaagacacatatggacagaagatttgtgctacacataaccaatcaacgattaatattcagaatatttaagaattcctaaaaattagaaaaaaggctatgccatagaaaaatgggtataaaataggaagagggagaaatcagaggtgaggaaactgaatgggtaatgagcataaaaaacatgcgcaacctcactagtagtcaagaaagtgcaattaaaacaatacaaagagatactgtcctacacctttcagattgggaagaattaaaatctgagaacaccaaggggtggcaaaaatacagggaagtgaggattttcacacagtgctgctagccaggggcagtggtgcatgcctgtagtcccaggtactcgggaggccgaggcaggaggattgcttgagcccagagttgaaggctgcagtgagctatgattactccactgcactctagctgggcaacagagcgagagaccctgtctctgagaaaaaaaattgtaagatcactttggaaaataagtggcattttctattacaagtcagcaaatctacaaatacaaatatactctcgaaaaccatagatacaggaggaaacctaagaatgttcactggggcattgtttgtcagagttaaaaactgagaccagtctaaatgtccatcaggaagagagtagatttaaaaagtatttgatatgtataagatagaatactatatggcaattaaatgaatggattagatacatttgaataacttaatgttgagtcagataaaagtctcagctaagtaatgttccttttgtgtaacattttttaaaaccacaaaatggcaccttaaattatctttggacatatatatgattttatatatgattttataattgtgggcatgtgtgtatagatatacaaaacatgtatatttacatataaacattcatgtatacatacaagcacacccacagttatgaaatcatgcctgtgaaagacatctagaagttccagagaacaatatcctctgggaagggaagtgggggcaagttaaattgagctggagcgaaaaggaggctttaactctgtaatgtttttttcctttttttttaaaaaaaaaaaaagaatctggggagtgactgcttaatgagtatgtgttttctttgtggtcatgcaaatgttttggaacaatatatctataggtggtggttgcataaggtgaatgtattaaatgctgttgaatgcagaaaaaaaaggaatcaaaataataagagacctaaaggcaatgtcacagaatttgttaaagttgagagttgattatgctaattaaagttgagggtcagttatactaatttaattattttctgtatttttgtgtttaaaaggcttcgttgaagcaacagccatcagcacttttgagatgtacccagagaaactgttagaaatctgtctcttagcagagaacgttctctttaggtctgtccctgtgtaccggaaggtgtttgtgcatgagtgctggtaccttgcctgtgtgcacacacgcttgtacgcttgtattcatctcatgctcagctgctgttgccttggcaacttgggatgctctgtctcctgctgagtctggggtagttggagggctttgtacattggctgttcatttcccttcgaggactgtcatcgagagcaaggctgatcagtctgtctgtctttgtctctgcctcctaaatatgcaatttaccttgtcatgagcatcttctagctactctccccagcttgcatacctcattttcagccattcatttctaagacataactgtgaatgcctaatcaaaaaagaaaaaaagaaaaatttacaaccttaaaccattttctctaaataagcagttaagaaccaggaaatgctttaaggaccaggtgggggggcgggggggagggggcgaacaaaagaaaacatgctgtatttgcattgtttctacagatcctcttttccaaccactgggaatgcctcaatgggcaaggcatccagcttaggacctggcaccagcacatattatgggatgctgcttccttggtgcttgtggaataaattcctactttttggtcactgtggtccattaggaaccttctggcttgaacctccttgttcagactggtctacagggttgagcttgacagtgcctcctgtcccagcctcctgtgcccgctggcctgctgtgccagtctttctagctgtcacttggagtgcttgagccagaaactgatatgataaggacacttaaatgctggttcagctctgggtctcacatgcccccccacccagggagattgtttagtggattgaggctgcatgaaaagatataaaacaaacatgtgctgtttatcaacacagtagggtttccattcttagaatgttaaagtggtcatgtattaaagatctctatcccaaccaaccagctagccaatatttactgagttcttgcactttgccgggcattttagaaacgtgacgactgaaatccatggaagttgtgtgagttctttttttttttttttttttttttttgagacggagtctcgctctgtcacccaggctggagtgcagtggcgtgatctctgctgtgtgagttctttttattagctcagttggcacctttgcctagagagatacctgctcaatgcaggtccctccatcctgcttaaaaggatcattagagcctcctcttttcatattgctcttctaagatcactacatacggaagaccacgacatagggactcttgggtaagtgctgaatccatattgagcccttagctgctggaactgagggtcttagcccagtgaggatgtgagatttttaacctatggagtggatgtgtggttttcccatttagcctcagtccagatgtacattcgcaaggaaagaaggcacctacctgctattaccccaggtgttaattgtccctgataagcagccagggccctgttccaaggcaggcaacgtctagacacagtccttggcctgagagagcaagaagaagaaaccgtccagtggaaactcactctggaaaggcccttgaacaatgtactcctcattcaggacctgtctggacaaagtgatgtgtttttatcagtctggcaacatttcttacaagtccataaggcccaggtgatgaaaacagcatggtgtgaatgtatttagtgctttttctcttctgttttaagaaaaaaaattattaacatggaatgcaagtgtgttcctacttgtcattctgagaatttttcttcttcttgactccagcctttccaaataattaattttatttgcctgatgcacacatagtggattaagagttttatggtaaagatattctccgaaattagtggtagcaattatctctcaggaagggcctgcgatgggcaggagactcactttttattgaatattctataatatttgaattaaattttcccaaatgcatctctttttcaattaaataaacttaattaaaacatcttttctagtagaacacaagggatacctatgctgataatattacatgcactgtgctgactcagtataggatcatttagattaccataccccagttctacttaatagctgtatgatgccgccaattagttcaacatcccaagcctcaattctcaaatctgaacagtagagatgaggttgattgcttatctcacggagtattataaaggtgaagtgaggcaaggatatcactcttccctgcattaaaattacattgcccgcctcccctgtgaaccctgtgtacctccatagcaggaaattcatcttatgtatctttacgtgcccaagtcccccagctctgctctgaaacattctgataggaagggccattctgtcatattatttattgctatatctctctagtgcctggaaccgtgctgagcatagtatacgtgctgtgtaaatgtttgtcgagtgcacttatgcgtggtaggaggtagttaattgatggttgaacactgacttgctgaaatgacttacacatgtcctgtctcacccctagtggttagtgctaacaaatgtctcggcttcagagaagatacactatggagtatacattccttttgcttattagtactttattagtttttcatcagctagcctgtcatgcattggcctcagcatctatcaacagatcttgtcattctgcctcccccttcccatcagaggatgtctcatcagtggacatcttgttagtgaatacctcgttattccttcatcagaccttctgtcattttctcagctgcgttgatgagaaatcccagacttcatgggaaaggtcaggagttggcaaatgagagctagacaagattcagtagtgacatgcagtggttgtcctgtgggatgaagggctttcgtgagtgatacagtaggtatacacaacagttagttccccatggaattcatggatacggggccaggattacatgcaccaccagccagaagatgacaccaggtcagcctggccaggctgtgggtcggatcacagcccttggcagtaggtttgaatgaggtggcactggagtaggcattgcctggcagtgctccccatcagcactgcgcagctggggacctgctgcagaagggccatgctcacactgctcagcagctgtagctgtcagcctctatcatggattctgataatcgtccagattaactgaaatgtgcaaaataggttggtgccttatggtatgtggtacgtggaccgtctcaggcactggttataggggcagattcctggatcccacccagaccttctgggagaggctctctggggtagggcttcgtaagtatcagctttaacatgctccagtctgtgctaaatcacaggaaaggtggagagccatgctggactagctgggagtctggtttttggagctgacagacctggacaggttctaggctgtgccacctgctagctgtgtgattgtggcatgcagccctgctcagcctctgcatcctcctatacggtgaagaccatgacgatggtgtccgtctcatggaactgttaggattaagtgagataatgtatgcagggcatcatagcacagcatatggcctaacacaggcagctaagagtatagctggtgaggcagtgatgacaatgatgatgactatccgtggagaggggagtggttttagtaattctgctccacgcagcattagaagagtagatgcttgagtagtgttgaagagatgatgaattattggccattttattgacaaacagaacaccaaacaccaaagatactcactccctggattagatgtcaccgtagtctgtgtatcaacaaaatctccaaagtgatttggaaggacactttgagtttggcaggggatagatgctggtgagtgagttggagaactaatgcaggtgcatcccagaagcaatagttggagcttctcccaattgtccctcaaatgcattagtcccgactgaaatctggtggtttgtgtaatgttaaaaacattcttttacttttcatcctggatgcatctatggcctgcatttgagctcctacctaaagtagttctgtctggcagagagcagaagaacactccaagtgtggtctatggctctaagctctgaaagcctcatcatttccttatggggataattaaaaactcttttaaagcctctgaaactctcttattgaaccctaataaatatcagtggctttatttgccacaacttactaaaaagcagagcagtggttaaatgaaaagatttatgatatttgcattgtttattttgaagcatctaattaaataattagttcagtcttctagctgtttttagaaacaagtctttagaaccctacagagagattttctgggcccaggaactcatttggggaagtgattggcctttgaacagtaagtagaaagtcatcaaggtagctctgcccacctggtgtttgcttatggaaaccatctgctggttaaagttcctggctcagaacagccctagccaggcagtcacagcctgcacagaggtgcagtgatggccatagtgtgccgaaggggctgatcgcttcaagagcgtctggaaagttgatggtctatctgtcactgcgatcttgacatcctgtgtggttcagtctggttgcagttggactcatgctgggtctggcgggtaggtgagaatctctaccttgctgttgctgtccaggtttcaaggcaagcgtgagagtagtcctacacagaggaaaacacacattaggctcaagcacctgcctgtgctttgctgctgcttgtttaaaggagtgcttggaaatgccagctgcccagcctctagagagctggggggatggacccctatcctgtgagaagttgagtttgaggatacacctgaccgctgagggatgcagagcacacctacgctagctcacttttacacaacccgatagatttcttgatgttatgcactggataattcccttgtggcccagtcaccttcccttttgtagggatggcctgtctatgtgatagaaagtactcaagccatggaatcaagtggatgtgaattccactgctgaacctgccacacactgactttgggactgagcgaaagcgtttctgagactcagcccttctaactctcacaggaggaatggaatagctaattgcacccagtgagggttaaaaacgtcttgtatgtgaaaggagataatgccacaccaggtgtgctcaggctgtgtctgttagcagctgagttgctctgtcgtctcatgcttgggcgtgctgttaggtaatttgctaatctgttttttataaagcctagaaagcaacaatcagaaaatattaaattcagaggttaattaggtctctcacataagccaggttgtgctggagttgcctaaaaattttgcatcctttctaacttctgcacttcgagaaagagcagggcctgttcgccatcctggttctaagagcagatggtctgcctgaccaagagctcagaggtgacattagttaaagatccatgacataagctacagcttctatgagcgccagattgacctttgttagaatgaatgagttttactggactttggtacagctactgagttagttcaagagcacaggtgctttttggttagaggcatattaggtcatgagcttgctagaagtcaatctctgtgagtctttttcccacaaataatgagtgctggggttcatgctggtgactgtttcctactttgatctggcatatgtctgcctgatccagccctttctgtgcccaacactccttgtgtctttaagatgagctgagtaaaaaattccagcaggaaaaaaacgacaacaatttcctattcatttaaatgactgccgttattgttaaagactcaactctttttcaaaactagatttccagtgccccaaaagacaaaacatagtgagcgtaataaacaggatagatgtgtctagtgcagagagaatcatcagaattactaatgaagcttcttcattaagctaccactccagtccagaaagggagttcccctctagggaaagcccccaaatgtatccttttagcaatgtctccctttatttgatctctgttttagagaaccagagtcctttacttcaacaaaataatttctaaaggaagtagcagaaaggctcgttaattgatagtttgggaattgtgctgcattgaattatataacctggaatgtcatattataccgatttagcactcacatgcattgcacaacagtttaaaaacgaactaagcaacatttccactgacacgcaggaggactacaatatgtctgtggtgtaacatttaggacaatacctttatatatatgttctcaatgagataaaggtcagtttcatggtaggtgctgctaagaataaggaagagagattgttctcttaacacctgtctagttaatgtggaacttggttggagaacccataaacacaaaatattcaggcattgttccatagtgaaaagacgacagctttctaccatggcagactcggagcttgagttgaagggacattggatggatatatggctggagtattgaggctgggaagtcctctcttacgttgaatcggggaagactgcaaagaaaaggtcggggagagaacaagatggggtggatgtcagatgttgttttgggggagaacagaggaagaggagtcactgaatagggatagtgtggaaggaggcttgcctcatggtgagtggcagaagggcttgggttgtatgtactagaatggccttgcataggaagggaggagcaagggaagtggatgatttaattgacgctaagaacctctcgcagatttttagaggccttagaattagtaggcttttctgaaaattagaagaactggagagggcgtggaggaaggaaagtagtatacttctttttcctgttctgtaagttttggggcatcatgcattaaattattaaaataatccccaaagcataaaattagggtattttgggattaccatgagtattttacccaaggaagagcgatccaagctctactagtttatagggtagtacctcaaagactgtaagtttatttattttctaaatttttggaagcatctcttttcagaagaaagactttagaaagagccatactgacagccttgaggacttggtgatttcgaacctacaggtcaaatgtctccgatgggtccagaaaggttgccttttctaaagaagtcggctcggtaaacaggaggacccaatcacaggtgccattgcttgaatgaacttgagagcaaccccatacttggtccctaaatgacccactagcaaaactgaaagacctttttttcttcctgcaaacacatacacacataacacataattcagattgctatatttcttgaaatggcttccactggggttgacatgggtctgatttgatcaaaacctggacccagcaagtgagacctccctggagctcaggctttatggtaacacagactggggttcgtatccccctttcgccgccaggttgtgcagtgccccaaaggcaagtcacctattctttctgaactccagtttgccctgctgtaaaaacagaatcataacacttgttccatgtgggttttgtgaacatgaagtaatgtttatgaagtatctagctgagttgcacattcaatgagctaaaaaaataaattgcagttaagatgttttcgttttaaattccttgacttgtgacctcctttctaaactggcatactacaatcatctagattcatttttacaggttttggggagtcaacattgacactgaaatcataaatcaggtttaaaattgtgtgttcaacttggtagaacataagggttttatacacacacgcacagagataggtataagttgttttctcaatgatgtttttcagtgatattggcaaatgtgattattacgcctagaaaacaataactgggaccataatcgtttatatgatatatgtgaatgtaaaactgaaactaaaagcaaatcctttcaaaaagcaaatctgctttggatagcatcagtcatggtcaaaaaggcagatcaacgccctgtctaccaagaagagcaatatttcagctaggaaactctatttgaagagattttatggatttctgatgtgtaaaatgattttgtatcatattgtagatggagtcatttgtagagagaatgaaaaatatattacttctgacatgttctttttaattgaaatgacatttgtacactctgatatttctctgtgccaatgtgtttttcttctcactgaccgcagccatcatccaagtcaaggtcaagggctgcatgctgtcccaaatgttatgctctgccgagccgtcccctgagttacagttgggaagtctgcaaacctctgcctcactcaccatcagaatattttctggaggaacaactctaggattgaaataagcaagagccagttctgctggggtcatagtccagggcccacagctcaaccacgagagaacagatacaaagtgtcctgggctccttcacatctctgtcattctgtcactcaggagcctggttaggtgactcaggttctgagcagtaccctgggttaactcctgccagcccactcagtttctgagctgcaaaagccaactcgagaatgtctccagcacggcctgatgcttgttgtacagcctgtgcaataagtaaaccagggattcgtgtgtcaggaagacagcaggctttgacaccatggtgccatttggatttggctctaccactatgatctgtgtgatcttaggcaggtcatcaaaggtcaacaagtctcagtttccttccaacattttgaatgacagtacccacatccttcaaaggtctgtctaaatgggatggtgcatggacagaacttacctccttctaaaagcttccttaatgttagctactatcagtgtggagttgtaatgaggaccaaagagaagtaacatgaagcaatacaaagcttgtcccacagatgtttctttcctgaagtcctttctgtttagttcagatgggcaggcgatgtgcaatgagggaaaggtgtgcattcatccaatagaggcattttccaaagccccgtgctcatggagagggacagtggcacatggaagtcttatggagaagtgccatgtgggctggactcccccagacttcattgtgtagctcctccctgcaatttcacagcactcttgacagcccagagtcaagcaaatgggagatggcggagcaggtaccttgagcccctctaggataaactaccacatgacacttaggatctttacttttcattatatctgcaacactcagcacaggaccctggaaagtttttgttgaaatatgggatgctagactgcagagtagatactcaggtgatctatgtaacctattcagtgtttctctaaagtgtttcaaataactttactcttggaaggggctccattaaaacaacaccaataaaatatatggtcttgataaagctcccttttggagaatggtgatgcacgttaacatattaaagcccctaggcagttctgcacaaagaaaccagtttaactgcattcagtccagcgtttctcagtttcatttggtctagggaccctttttcacttcttcctaggacacttattaacagctcatgcatattagaacccatcaatcaatggcatattgattggtgttagtatataataataaatccttgtgcatttttatgtaattattagacttctgtgtaggcatttgcttcctgttacagtgccattgtccttacctgtctgcaaaacaaaattcatttaaatttttctcctgtaactctgttgttgatgtcagtggggatcaaatgttcggctggacttaattttttatgagccctgttgatctttctgcatgatgacccctctgccgcatgaagccccaagcccagtaataaatgatgggctgagactcactgggcagtctcagggggccctgattgttttcacaactgtctctatgatccaatcaactttgttctgaaaaaatagctgggattccccctactcctcaccacctccatcaccagctggctgttccagtccaagccatcattgtgtcttacatggatcttcacagtagccatctaaacagactgttcccagcacagcagccagtgcgatcctgctaaaacccaagtcagatcaagtcagtccaatgcctggaaaataccagaatcctcacaatagccttcaaggctctacatgaccagggcccctgccacactcctcttctctcactggctatagcaaccccggacatcttggtcttctggaatgctccgggcagggtcctatcccatgaccattgcatttcctctcctttctacctgggacgctttctctcagatatccaaatggctctcttcctcacttatttcccacatctgtcaaatgccatcttaccttatgatcaaatcagggtaattagcatagctcttacctcaaacattcatcatttctttgttgtgggagcacacaaaatcctcttctcatgctattttgagattacaatgccttattgttgactgtagtcaccttactgtcacatgtatggaaacatcacattgtactccataaatatgtacaattattatatatcagttttaaaaaaagataaaaatttaaacacatgcttcttaaaaaaaaaattccatcttatcagagaggcttacctgggtcaccctatgtaaaatgcaagaatcccccacttccttgacagttattctctctctcattccttgctttttaacccccttggcgccatcagtgcctgccctgtgatgtatttatattgttatttactgactcaccttctcaaaggaatgttagctgtgctagggcaagggctcagctttgccaagggcagcatcgctggctcctagcgtggtgcttggcctgcagtcacagcccaggacctgaccattgaatgggtgagtaacggcagtggctagcagccctctagtgatgtgaacagagcgagttatacgcaagaggttgtgaacatcagggaacctctcaatttgctgtgttatttggaatggctcagcctggcagctgtccccagggtcacagactgctgcttctgagtaaacttgtcacagctgaaggtgagagccagcgaatcaccagcacatgagcggggactgaagcctcagaggagaaggagggtggtgcaaagacagcccagagaggaagagacagaaggcggagccctgcagagcctcgggcagcaatgcaagcaacccactgtcactgaggttgcctttatgtaataatcagtgccgtttattgcatgagtgcatcttctgctgtccttgttgcctcttacaaagaccattgtattttcatcttctcagttacaagcctttgagattggagcagcttgcacgtgagcaaacagctcgccattaggaatcagtctggataagagcaggaaagggctcagctttcttgggcttttcttgccgtgaaatgagcaaattgaaagtgaaggttttcaaggtcccttcccagcccacagttctgggaatttagtcaccttgaagccaagggagcatgtgtgtcactcatttcatgactcagaatagcaggcacttcagaaatacataaagccagacccagaggtggtgttggccttgtggaaagtgtccccttcccatcgctgaccacattgctctagaaattgttttccttggagttgatgtagactgtgatgaagaaccttgtacaggtacatggttttcccctgtgagagcactggctcacacccggaatcccagcactttgagaggctgaggtgggcagatcccttgaacccatgagttcaaggtcagcctgggcaacatgatgaaatgctgtctctaatttaaaaaaaaaaaaaaaaaaggctcagacgaggcttaactctaggccctgctcgactgaggtagaaacatcctcagagcatccccaaggagctagagaaagaacaaataaatcaccaatgaatacaaagatgaataacttcagagaagtacttcatgaaaaagaaaatggcatttgttgaatgtaaaagaacaactgcggtagcaggttatggatcaaagctctcacagcctgaaaattaaaagaccctgcgtcacacggtcctccagggaaaatagccagtggccccacagttctggctacgaggcttcagcttccagagagagggagactgacatctccactggactagaagaaaggaagcctgtgtgcagatgggtggctttgcatgtggcagaccttgaagctagggggagagagccatctttctagacttgtcaaagggcaagaccgggcccttctcagcatagagggaatgtgaacttggactctaattactcatcagttctctcggcagcatggattgatattggtatctcatttcgtggatgaatagagaggctcatagatgttgaggcttggtttgagtcacacaggtgctgcggccaaacgcctctgatgttcctgcagtacgtggcctattctttgggccaggtgctgtgttggctgccatggtgatctgacctcaaccctaccagccgttttggatagtggtgacccctttgtggcagaaggtgacatgagatttgttcctgtggtctgatgtgcccgaggagcacagcacagggagccttgaaacaaggtgccccagccacccgccgagttaggttacacttctcagctgatgacttaaagtattaagaagagacaaacaggcattcttcagtgatacagaaaatgtcactcacaatcaaacattctttcttgtttttaaatccagctgagctatagacctgtcataaaatcatggcatctaaaaggccctttagaggtcctgctggcaggggatgttgaggaaggatttggactttgagtcagacctgtggggtttaattcctggacctgcgccatgcagttcagtgactggacaagatgctgaacctctctgagcctcagtttctcaccttgtgagattgctcaagaatatgctgtcctaataggtgacagaggtcaggcaggaattaagcaggtttttctatgtaaaaggctgagcgtacagtaggttttcaccaaaaataggtgacctcccctcgcgtggtcactcccacccccatcttttctggaccaggagggcacaatcttacccccagtgagcaatgctaaggcctctttatctccccagatccaggctaaagcttaaacctgagcccattttcctttgtctcggctggcaccttggcaggggagaaatatatggaggaaaatcagtacctttgtttcctcccaaggaaaagaaaatgcagaagcctgatgggcgtctcacctagatcacagttcactgggccacgggggcagtggaccacctgcggctcttttaagtgcaactccggttcaagccaaatacctgggcacagatgtgaagcgtgggtggcagagaggcaaagaaagagctggaaagaaaactggcactcttcggagggctgcaggagtgagaatgccccgtgattagggtttccttctaggcccgtattttcaattacagtcataatttattgctattatgggcaccaaactatacttgccatgggctttgcatacacaggaaatgagccagcatttaaacactactcagaaaaaggggcctaatggctaaaaagcagtgggaaaatgcaaacctgccctctcctccttgtcacaaaacacccacctcttcctcctccacttgtccactaaaacacttgcctttaaaaatcaaattaacaacatttattgcttatacaacatttattgggtgcctagtctgccaggctatatggtggaagtggtgaggaaaatggggcactttgaggatattgtccttctctgtggagggagaagggtgggaggttttcaggtcccaagcattctgggaactcagcgtcatggcttggcaaggagacagagtaggcattgagggaggtggaggaggagggtaaggaggatcaggcctggatctgatgtggagggaactgagctagctgtgagtgtaagtccttcctaaggggaaaagctccactgtttggtttgcagtcccccaaaaggctgatgcattctttcttggtgccatggctaagcttaaggcatggctttcagaagccttggacagcagagaaatactgggaagcaggggcaccaccatttctagtttcaggtgggagagctctttggagtgatgtcctactgatgagcaaggtccatccttgggggcttgggcaggcaagagctaggcataggagtgagcaacttggtacatttaatgccaggagctttccgtaggtcctgttggcgggtgtattcatccattttcatactgctgtgaagatactacctcagactgggtaatttataaaggaaagaggtttaattgactcacagttccacatggctggggaggcttcaggaaacttacaatcatgtcagaaggcgaagaagaagcaagtaccttcttcgcaaggcagcagaaagagagaaaagcccagggggaactgccacttctaaactatgagatctcgtgagaactccctcactatcacgagaacagcatgggggaaaccgcccccatgatccaatcacctcctacccaggtctctcccttgacacatggggattacatttcaagatgagatttgggtgaggacacagccaaaccatattgggtttaggacagctttcactcccaagggagaggcagaacagtaagcaagcaggaagatggccagaacctagagtttacacatggcagtgagcgtggggtgtgaacaggctgctaagggtaactgttgtgggcattgcccaagcattgctgatgataagactggtccagtccctgcttgctggtggggcccaggctctgaccccatttgctcaatcaggaaggcccgagcttataggaacatggcttcagaaacaggggccaagaagaactggtgaaggcaggagctgatagctggaaaagtaagacataagaaaaatacgaaatggaaatttaaaataaggtacaaatgatttggcatgtggttggtcaccaaatgaattgcagagacactcctcagaggattaaagtagtgggcagaaaggatttcaggatagggcactccaaggaggagatgaaatttctgctagacattatagggttttatcaaaccccaagaagagagttagacattctggacaggaagatgatgtgcaaaaagcccaaagatgtaaggctgggagatagcaaaccaggtcttgatgttgcagatttgttgtatatatatttatatagatagatagatagatagatagatagatagatagatagatagatagatagatagattagatagatagatagatagatatagatagatagattagatagatagatagatgttatagatatatatattatgtatttgatataaactaatgcatatcaaacattgtttttttggtagagatgagatctcactgtgtttcctaggttggtcttgaactcctagcctcaaacaatccccccaactcagctgggattatagacttgagccactgagcccagcctgaagaaggctttgaaggctaaaggaaggaatgtcgtcctgatcccttgggatctaggcagtggcaatctctatggcctttgtaagttgacatggaggtaggtagtgtgcagcacgggacaaagagatgggacgcagagagactagtgtgaaagactattgcatggcttaaagaatgaattaataaggggctgcatcaggatactgactgtgaaatggaggagagagaatgaattccagagagttatcaaagcaaggatggatgggacatgaggaagaagaccacaaagacagggggagtgagtgacagatggtcacagtcataaaaggaggaggaggagggaaagattgggggaggatggaagatgaacttcgggcctgtggatttgaggtggcaatgagaatccaaatgcttacatctcaaagtgagttatgtgggattaagataaagactagggcttgatcgcacatttgaaaattttctctgtagtgtggatctctctagaagtcacaagggagaccacttccttcaaagagaggagaagaaaaggatacagaggatcagctactcaacacccacttttgatgggctgaagaaggagagtgaacagataaaggaggactccaaggttaagaggcaccataaaaagcgactagataccatttgcaaaggagaaagagcccaaagaagacaacatcaaacattagcagcttcagctgctgcagggagattagggagaatgagggttaagatctggttattggaactgatccctcaaaggtgcggatgatctttaagaatgttgtttccattgagttggaggagctgggattgggggggggtagggaaagagcaggtggcattgaaaacatctaagtagcaaaaggaagcagggatccttatataaacttaaaaagctgtaagtgaaaccaaattatgttccctgacagggaaggacctagtgttgaacacatggcaaagagaagaagcggtgtgtgaagcatgttctggaaaaggcggggaagggctggacacgatggcgctccccttctcaaatccaggggtggaagaaaatgggtgtagaggtggatatttaggggaacagaggactggagcagggttgctgacacaaaatagccactgcttcttagggatgttcaatgagagggtgatggctgtgggtggtaggggagggtgggagaaggcctgtgtggacatttggggaggagaaattctggaatgattcttgtggaggattggctcaggagttcacagggatgagcgaaaagggaaggtgaagctaccaggggcacatgacacctcccaggatgctcagacagccagggatcttgtttgggtggtgggggttgctccagcagaccagggtggaggcttggagacataggcagaggtgagtgagataggggcccatcacactagcacactagcccaccacatactcctggaagggcaggaggctcagaacagttggaggtttggagaggtcggagggaaacttcttgatgaagcaggcaagctgctgatgagtggaggaggatggatgggaggtgccagcgatgagatgacagagatggaacgcagaaggtgatgatgtggttgagggctgggctgtggctgatgcgtacccgagtacaagggactgagatggatgggctgaagaagacagatgtgaggccaggccttggggcggtgacggggctggcatagctggaagggaactgggtgggagtcagggacttaggttttaacaaacctgttgctaagtctttgtttggccttggccaggtcacttgggtttccctggtgaggggctgctgtcagcaccatccttgcattactgtgcacagtagtccttgagagccagcaggggccctggtgatggttcagagcagtgaccttgggtgcttcagcctcacgtggtcacacctccacagaacatgatgctccctccctcctaaccagtgttacatccacgaccccaccagcatctctcatggcatcagaagtggcagcaggcagccatcaccttgtgatactgccacttctcttccgcagggattggaagctctgcatttcagagccaggtttcattcagtcccctcaccagcctcctggcagcctgacctcaggtctggcagataaggtggggctgctgtggtaatccaggagaagtgaggcaggagggaggactggcgtccgtcgggccaccaggagtggggagcctgtctcacctgtgggctgcacctgagtgggtgagcatggcatcagaggggatcacggggtgggttggagtgcagggatgtcccccagtgtgttccccatttcagtcgccctcccagtctgtgaatctaagagcctggccactgaggcatccaggtgcaagctgggtgaccctcagttacgataatgtgactgcagcatctgatgccgctaccatcactcccctggtgctgggcctgggacaaggtgccatatggggaatttttttccccccaggaggctatttttagagtgctccagctgaactgttgctgtgaactctatgtcttaactaggagtgtgtgcgtcattaacgaggcaggtgtgtgcgtcctgggaggggctgatgcgcggttcctaatggtagcatgtgtgggctggccggttgctgctttcagcctgccagggtgactttgctcattgcctctcacttgtgcaggcagaggttgtgtgtgagatttagggtgccctggagtcaaactatctgcctgactcttggctctaccacttaccagctctgtgaccctgggcaagctatggattatgtttgatgtgtttctcaaagcctcagcttgctcctctgtgacttggggtagtgagagcactgatttcatgaaagtcatagggaaatcaaatcaggtaaaggcaaagcatgtagctcttcaatgctaagtgttcagtaaatattactttcttccccttcacccccagaggcttcctcctatttataagcttcgttaatcactgccatggccaagccctgccctaggcccaggagagctggtggtgtttaaggtacgacacacgctggaagcactccttgtacagcaggaaacttgaactgcatcttgagggatggtcaagagtttgctgggtagaaatctagggttgtggggaatgattgtcctatgacagaaccctcctcttgaagcctatctactttctagattttagctgatcgcccagtttcatgggcaggcaggaaagggaggcctttgtcccttttcccgaggatgaactccagccggtgtgtgtgttagatatgtacagagcccagcagccttgccacttgtggggtggctcctttctacttgggtgccttattgtctgtcgggtgccccacagcagagacctcagggttttggtggcaacctgcccagatacggaagaggagaagggagtcagagtggccttcatgtcagggcagtgaggactgtatcaaagcccaaggctcgtggaaccatgtgggggaagcgacatggatacagagccctgagagagggcgcttccaaagaactgctgcctgttgaccattctcttcccctgaatgtgatccatttacaaggtggggacagacttttttcagttgttatatatctgggatatgagcctctctctgagtacctcaagttttttaccagccaagtagacttgtagcttcagtgtatatgcgatgtgtgcatgtgtatatatacacacacacactatatatacacacacacacactatatatatatgtacagtatatctgtactctatccatccatccatccatccatctatattttcccccatagcgcacatttttgtaaagtcccgaagcctctagtttgaagcaatgctgaaatctgtcaactcaatggattaatagtctaatctcagccaatttgtttggcagaaacactaaattcctgaaaccatgtgggctggcccacttgacccctgtcctgggaaagtgaaaaaatacatcccaggtttttgggctaactagcattgaaaatcaatccatttttattttcattttcctacagtttcatggtggccactcttgactcccatttgtattctgtgtgggtcatgttgattaaggaagtgaggaggatggatagacagtaagagggatggcaccgtgcatgcaccacccagcactcccctacagagagaaagctggctctgagggtcaggccagtgccatgaggctagctggcttcttttgacattagtgctcagaagagacctgtttccatagcttatccatgtgggcagtggtggagaatttacccaatccagaaggtagtatagtgcatggtacagcattttccaaaaacagatattcttccaagccgacttagaaatatttttaatcattacattgtttctgtggtatttgataaagaagtgaatttagtaatagtgtaaaattcctggcttcattgttgtgtgatctcatgtaagttgcatcttctctccaaaccacagttcttgcctaatgaggagatgctgataataatacctacctctgagggttgtagtgaggagtaagtaatatgtcacacgggttttcccagacatgtctaagtactcaacaaatggcagccactatccctatcatcacctgtatggttgtgcttgttgtcatcatcgcatcctcacatttttgggtggcccagacttagtatgcccttgatagtgcagcagaaggcctgctgaatccctgatgcagatgtcacttactcttttaagaaagcattccctagccaaccatgcagttagcctctcccattctgtatacatttctcatgtacctatcataccatttatcaaaccatcttttaactgtatgtttgcaggcctgctgtgccccatgagggcaagagactgtttcagagagagacaaaatgagtaaatagctgatgggtgaattcataaacaaaataatttattttgctttctgtcttctctcacagacattttgcaagaaggcagacacaatgcattttgagaaaacaaccactcctacaaggcaagagggttttcctccatccgagaacttcctacacttaaagcaagtaggcgaaggtcatagatttccgtaatagttttattggagacttggtcttcatttatcattcatgagaggcttacttagctcttattacatgctaagcattaaggtcacaaaaatgaataagacacagccctaccctcaagaagcttccactgtggtgagagatgttcacatacatagtcgaggtacttttattgttaacgatgactctgtgcaaagcaagcaccaggggcaccgagaacccagggctagggacgcccgagggaggctgtgggaggcagaggagtgtcagagcctcctgtgccgttccacccagcctaatacagtggcagccctggtttcagaaagcaaaggccaaagctgacttgtggtcagattgtcacacctgcctggagtggcaggaaggcaaagccaatacattttattgctttggctctagattcagccagaaggtgtagtgatgaggcaggaaatcctgtctgaaaccagagttcccatctgttggcataaaatcctgatgagccttttaggggagataaaacatcagtaatattcaagtgataccaggaaattcccggctttaaaaggacaagattttagcagaggaagttggatatttagagttgcatttttttccaaaattatttttagcctccagctatatataacttttcttgctgacttaggtacagtatgtggattcgactgattgtatttaggaacaaaaacagacattttaacacctgtgcgtgtgaacattctacataggacctgctgagtgataccttgtaaggactaagggtaatagtcacccataaggagtcaccaatagaactattaaggaaatctatgaccttagcccacttgccttaaagtgtaggaagctctcagatggaggaagaagctcttgccttgtaggagtggtcattttctcaaaatgcattgtttctgccttattacaaaacgctcgtgagagaagacagaaagctaaataaatttgttattttgttttcgaattcacccatcagctgtttactcattttgcctctctgaaacaggtctcttgccctcacagggtacagcaagtctgcaaacatacagctgaaagatgctttggtaaatggtataataggtagttgagaaaggtttacagaatgggagagactaactgcatggttggttagggaatgctttcttaaaacagtaggtaacatctgcaccagggcttcaagagttgacaggaggcttcccaggaagaagaagggcagaaaaggcaggggcactgggaagcctgcagtgctacctgcagtcagggagtcgtgggattctgggaagcctgcagtgctacctgcagtcagggagtcgtgggattctgggtgtcagagtagagtggctttgtagccagaagtcatcgaatcaactgagtggatggttatgccagcaaaaccgttcactttacaggagaggaagcacagagaaattgaggggcttgtccaaggttacacaagtctagggaagactcacagccagaacttgggtcttagcttcttcaagtgtggcagaagggcttggcactaagtacgctaaagccacctcgaggattccttgatatttccctgcagccttacatgcagccttacaaggataaacttcagcttaaactgaatccacctttctttacagaacatacaaggaaaagtctagtagctgtttgcatcctaaatgtccacatttgtgccaaacagctagcctggtcatattttcaagactatgggattgaaatttattgcattttttaaattattctttttcattgtttggtactctatatgagaagaaaactggagctttcagaaagtattgctattaaaaggtgaggttgaattttttttcttttttttttttaagacagtgtcactcattctgtcaccaggctggagtgcagtggtgggatctcagctcactgcagcctctgcctcccgggttcaggcgattatcctgcctcagcctcccaagtagctgggattacaggcatgcaccaccacacccaggaaatttttgtatttttagtagagacgggatttcactttgttgcccaggctgatcttgaactcctggcctcaagtgatccagccgcctcggcctcccaaagttctgggattataggcatgagccactgtgcccagccaagactgatttttcataaacaaacttaactttaaaagttgagacagatcttaccctcctacagaaactcattctgaagagctggatccttatcccattgatccttaccctagagggcttttgagctccgtctcaaggggctaagatacctttttttccagctcatagtggtggcagaaggtcaggtttcctgaatatcctggtgtcatatccagagccaagtccagtgaatctgttgggccatgtggtccctggttcctctgtcttttgtgcttccagaacacccaccatgcctgggtggcacttagcatttaaatcgtcttttccctattgtggattcactaggttgcaaaactgtggacatagcacagacttgttccctagtgagtgaaaaacatgaatgaaaaaagcaaaagaaactgatgcaatccccacttccatacatatcatgggcagagttcatctcagtgttttttttcttttagtggagtctgtgtgttcatttctagatacagtttggtaaatagaagtgactggacaaacagtaaaaagggagagggcttccctcactttcattcccactcccaggctttaatcttcagaggaaaatgagccttgggtccagtgggaagtgtatggacatactgtgctgtctaacttgcttttatagtgagttagacagttttggaattcatgattagtctgtatttaagtggaatttatgctaccatgtattgacgtgtttgtgtgacgttcgtgtgtatgtattcatccacccactcatgtctgcctaacaaatgtttgttgtgcctactatgtgccaggtgctctctcagtcatggggatacagctttcaaaaggcaaagtcaaaatcttcatgctgcttacatcctagtataagagagacaaaaatttaacatctacacaaagcaaaacaggattagaggctagagaattagtgggaatgaagtgtaatgttttacaaaagtaggccacggaaaacctctctgagaaggtgacatttgaacagacttgaatgaagtgaaggaatgccccagaaaatattaggaaacctacaaatacaaaggccttcccattcatcaacccacctacccacccatccatctacctacccatccatcctcccatccatccctccatctgtcctgccactcatccctccatctgttcatccattcatccatccatccagccaaccagccagccagccttccatccatctgttcatccatccatctgtctatccatccatgcatctatccatctatccatccttccatcctcttaatggcatgtcctcatggtgtggcatattgagagagaatgattactgttccttaatagcagtttagtagacgttatttttcttaggttgtcctttttttttttttttgcttttaaaaaatttttttcttgggttttttgttttgtgttagaagagtggtattttcacttgcaagagatttttaaattcaagaagccaagaagcacttaaggatacaggctcaaaggtaagccaagccaatccctcctaaattttaagttcttattttaaggctgtggatgatacttcatagggttcttgagagaaatgtatgggggacaccataggcacaaaagctaattgcagcaacagcgatgacactaatgctgctgctcttgctgctgctgctgctaccactactactactgctgctgctgctactgtggctagcaaacatatcagtggcatccacttgttgttttggagaatgctaggctctgggccaggcactttccattcttgctttctgatttgtgacaactctacaaggcaggtatatcctattccacatgtgagcaaactgaggctggacatgaggctatgatcaattcttttccttccccaaccattcccgtagctgtctctatgagtttagtgttaaactgggatgatctgggactctcttctcagtcagcaaaggcagaaggaagtgttttgaattctcccggccgtgagtggctgccatctaccttgctgatgccgcgtgatgcatggcagtaagagttaatgtttcccaagggtcctttagcagtggagatgctggaagagtggtacacgggtttataagttacttaacagattttatgaactgctaattaccttgtaaagacattttattgagctagagtgatctgctgttggcactgattgtttacatatctcagtcctttggcctgtttcttttgccccaggtcagcgcatccctgagagctctgctctgtgtgcagcagggaggctttggtgcagttctttaccctgcacgtgtccaagcccgtgtccatgcccttgtccaccaccagtcaccaagtgtagggatgggtctctgtttctccatccggtaactccttaactgtcgttaggaaaggcaagcagaggaactgcagtcttgggtgtgacctcccaatttgactactagatttggcaagaaacaagagccttggctttcctatctgcaaagtgaaggaaagaatggagaaggcaggtgtgtgttccttgtctaatggactgttcctccacagcctataagaagtttctcactaaggagacagaagtgacgagagcaggtggtggtatgtttaacaaatacctgagagcaagtagaactcatcagcttctgttttatttttatttttcctactgagtagaatgccttaaaatggaaagtgtgggacaaacaggtttacaaagcagctagagtccacagtaattaaaaagaaaaaaaatagtctaggggtccctaagggttctatgatttctgctttccgttttcttcagagaatttgatgtgagttcataggtctgtaaccagttatttattttaaaaagctatgcaggacaaggaaagagacatgtacaaaggaggtggccatgaccgtcatggttttcattacactggtaaagatggattctgaaaacaatggacaattcatgagagagtgtaacaacattcccaccaaatgtctagcatagattatggccgggcacagtggctcacacctgtaatcccagcattttcggaggccaaggcaggtggatcacttgaggtcaggagttcaagaccagcctggccaacatggtgaaaccccatctctactaaaaatacaataaactagcttggtgtggtggtgcacgcctgtaatcccagctacttgggaggctgagacaggagaatcacttgaacccaggaggtggaggttgcagtgagccaagatcgtgccattgcacttcagcctgggtgacagagtgagactttgtctccaaaaaaaaaaagggggggtacattattaaacagatggtgagctttgatagaagatctctgggagttgtcatgagctctctaaaaagaagcaaagccaaataatgcattacatttttgatagggtcagtattgtgacaataaatgctaaatacgtgatttcctggagatgtagaacaaacgttcttttaatatccttgtgaactttctaaacaacaccacattgctttatttgttgagagataaactttgtgtaagacacaggctaatgcctttacatacgttgtcccacataaatctcaaattcaccatttgacgaaggtaccgtcatcgtttttttcgatattgtggatgagcaaataggctcagagatttagcaacttgcccaaggtcacacagccagcagcagcaaagaggagtctcatcctggtttctctgtcgtcttcacccgtgctttggccacagcaccgcagtgctctctaaggacttctgtaagctgcacagtttgctcccgacgcatgcattaaaggattgacattggtctggaaagacccctggtgtggagtgccacaagactgtgccctttgctttgtgccgttcaacatttttatccatgtccctaacgaaaacacaaagacacacttaccacataaacgaagcagtttgcacaggctggaggaatagatcatgaaaacaggaccgcgtaaaataatctgtcacacccgtggacagaaacctcgactgccattgcaaagtgcacaagtctgcagcttggtttttagtttattttagttttcaggtaaggcacgaatgtgcaagaggaagcttaggagcagagtttgagacaaggatgtgggcagttaagagcctgcactgactcctctgatcacagcgttcggctcaatctgcacaaaccatgttgagaatcttccctagaatttctgccgagacttagcagtgggcacaaaacccatcactctgcttatgtgctgctgtttatactgggtgcctctgagcaccatgtgggaaacaaagaccagagtctcttgtggaggaagagagggcagcacacagtgggggaggctggtcggtcgtatgtcaggtgatgatggtaccagaatggctgggggcctcctgggaatttccacaagtcccttgaagtccccagccaggggatggttgagtccaaatccgaggcctccaggttcccattagcatcctcgggaagccacagcaccaaaatctgccccccaccctggcctttgctgaccccaggaatagctccggctcctgcccctcaacatttgcaggatgttcgccaccatgcttcactcagcaaaagtattttttctacagatgtttattgaacgccgacagcactagacagccagtgttctaggccctggggatacatttttaatgaaatacagagagaaaagatgaggagagaaaagacacaaattccagccctcagatctgagagacagtctaacccagagcccagccaatccaatcaggatttgggacctaatgcaatattcagacagcccaaatataatcgttttaagctagaatgatcaggacttgggtttaaaaagcaaagtagattttgttccacaataaaatcactgcttctgatttttgtggagaagatgctgcaattaggggtttttccattagatccgaagccaagtggagaatgccagaagtttggcattcccaagaatttttgtaggatctggaaatgagagtgttttgctttttgctggcgtatcagttaggagatcttgacgttcttgtttcagctgcaggcacaagtgtgtgtgtgtgtgtgtgtgtgtgtgtgtgtgtgtgtgtgtgtgtgtgtgtgtacgtacatgagaaaacccctgacccatggtcaaacaacccccaaaactgccagttgattagaaaaatgtcctgtttccttcaggccccagaggacatacatttaagtaaatactttaattaaattacatcctgttgccaagtaatttcttaaaagagaggcggtaaatggaatctcttctgggaaagtttgctataattactggatggctttcttggggaggaaaatgtttatttaaaaactccgcagcctcttatacttctatgccaggtctctgaccctgggggaaaaaaaggaaacttgttcacttcctgaggttgccaaatttaggatttgtccctggcgatgggaacagctatcagggattgttttgccttcccagccaggctcctgccctggagtgggcatgagcggcaggacccctttgctctggggattaaagatgtttgcactggacccaaccagagactattcccaggcttggtaggtgtccatatataaactctccgttccgcatcttttacctacttaaacgtagtcagtgcctgggcaaagactcatgtgaacatttgtttttgaaaaatgtttgttttctcataaagaaatacatattctctgtagaaaatttggaaacacaataaaggctaagcaggaaaataagaatcattttcctacaacccagggaaaaagtacatttttgactgttttttttcccctccttgtattttttttttcccaaacacatatatgtagtcgcgctgacactgtgtaaatgaattatttcataagattttgtcaaaaggaaaggtgaatggcctctggccccaggatctgggctcccagtgcagctgaggcctgctcacttggcttcatacatttttaatagaactcttccgtctcacgttatgagagataaaagatctatgattcaatcaggcaccttcttggctcaggtgaagagtctgtgaaccaaaaggccacaggtcaattacctcggagctgctaagaattgcagcctgccggctcagtctggcttcaaccgttgcattattactctaataaaatgtcctcggctacattttcgtaacagttggtgataggagtcccaaaggggattgggcatttatcttgaacacgggctctgcccacgttcctaccatagcatagcaaagtttggcttaaaattgaatgcgatcctcctgttgattctttctgtgtgttttatcccacaaaatgccccaaagggttagttggttttcaaaagctacgtgttagacacagtttggtctttttttaccctcctttcatggccttgagattatgaattgatgcttttcttagatgaataccaagagaaaagaactttacaaaataacaaaatttcatcctgggaatccacagtggactcttcttgctttgcggggagcttctggcagaagctctgcagtggggaaggatggtggtggtgggctggcacaggcctgtatgattatatttcgtgctagagccgcagtcagtaacacagccattactatgccgtctaagacagattaaaaacctggtgtcttttctgctgattgaactctggaaacttaacatgaactttgaagaactctgccctaaatccagctcactgaagggataaaatacttgggacacattaaatctaaaagaatcttcaggtcatcttttcttggacctcggatttacagatgaggaaagtgaggctctttgagggttgagcaacatgctctaggtcccaccccaccatggcagagaggaaagtggtgcccacctctccatagcctaagccatgcctcacctgtgcttcctggtacctcttagcgctcgcattctaagtacaccggtgagtacactactgaactacgtgttgagatgggtaccatggaaacgagagatgcccacccttgactcagcagttggattactttaaaaacagatgccaacctatggagttcccattttgttcttaactggaatgagtgtgctgtagaattacataaatgcacctgtagctgcagcatcttgtctgggcttgggctgtaccctgtgagggagggagggacgctttgagggagggaaggggaggatgtttcatcaatgttgccaatgtctgctatgcttttaaagaaatgttctgcacgcatttctggtatccgctaaggctttatttagtggttccagagacccacaggaaagccaggggtaaggaagagaaaagacaaaagacatcaatagagctatgaatgagaaaaaaaataaaggagttgaacaggaggagttttttcaaagagatgactcagtagaaaaacaatagcagtataaaaagacttggaaaagcatgaagagaaagaaagagtgttaataatgttaacctttcggaacttatccagtgcacagcaggaatgggagcctgttttgtttggttgaaaacatccacctgacagtaaagacttcctaaaagcccaaataagagggctgagtttgcagctcaattgctccactgataactcctcatgctccttggggctgcaaaggttttgggagcatcatttcgtggatccctgaccttgactgtcttcctcttgggaatttcactgtacactctgtagaagtgtggtatgtctgaggttagcacctagggatgccttcatcaccttcactcttgggaggggcatagagctgggccaaggacacagtcttttgcgggtacatagtaggtgaatatatttatggggtacatgagatattttgaaacaggcatacaatgcataataatcacatcagggtcaacagggcatccatcacctcaagcatttatcctttctttgtattataaatgattcaattgcactattttagttatttttaaatatacagtaaattactgtttactgtagttgccttgttgaagagcacagtcttttgagcaagactgagcgtttcatcgtggaccgtgccacttactagttctgtgatactggccaagtgggtaggaattttcgagcctcagtaggtatctgtaaatggatgtcagttctgtccactctcaggattggcatggggactgaggcccaggtcgtccatgcatggttgtcgttgttggtagtgatattcagtctaccctcattcttggaccactgtgtgtctttcacttagtgtcgggtctctgctgtagcaatgtttggccaagactgggggccagaatgagttctctaagaaaaggctggcattaaatattgtccagtattttctcaagcccagagggtcacaccatgtgcaggcgtgtggcagggggagaatgagggagcagtggggccaggtgtgaggagaactgaactctccctgggagcatctagggatgcctccttgaggatgcagaaccacagaggtcctcaaggaaaatgaggacttcaacacagcattctaggtggagcgaatggctgcagggaagtctgagaggctaagtgtatagggtaattcccagtctagggctgtgttatgttttcattaccatagagtcagtgcaggggtggtgagggtgtgtatggtcggtgctgaagctggaagggagggattttggataaggctatgaattttcagattttactgtgcatgtaatggacaaactgggtgaaagctttgggtagcggaggtgctctctgggttttggcagaaagccctgggtgcggtgattgggtaggttggagtgggcagcatcttgcaggtgcagaggcccccatcgaaggcggttgcgatgctcctggcaaaatttggggaaagcaggccaagttggagatgtggtgaggagacagctttgaggagcatcatggaagcagtactaaaaagatttggagcatggttggattgcccttataagggacagagaagagataacaattactctgaaatttcaagtccatacagctggcagctgtgataggaagtcaagatagaaaaagtggggcggggcgggcggggtgagagaaaacaagtcacatttggacaccttgattttgaggcatcaggggaagtccatgtcagtggatttagctggtagtgtgggatgtgggtttagcacttagagcatggatcagagcaaggtatgtacaggaaactttgtgatgctatcttatttatatagaattttagaatttaccaaagaatctcacgtgtaaaaaaaacaaaagaactccatggatggggcattgtttttccattctgggatgaggaaactgaggccatgcctacgtaaatgtattgattagaaaagagtcaagttgaaggagatttctgagcatattgttccagcacctgcaagtgtggaaatggacacggatgtcctcttagtatttctgccctttggagagacttctgcaaccctcctctcctccaagagcagggtaacttcctcctcttgcattctccctccaactctcttccccttagtggagaagtaacgatgttcacgcttgggcagctggatggacacgtcgtggagtgaaaacctaaagggaactaaatgccgagacggtgggcaaaggagaacgagggaggagcagagggtgacttccagctgggactggcatgtgttcgttcagcccgagcttccacagcacaccacatgctagcttaagagctgtgcatacagcagcaaacaaaatagagaaaaatcccttcccactcagatcacatattccagtgagggagagagacagtaaacaatataactaagcagagtaggtggtggctcgctggtggcaaaaaagacggggataggagtgttgggagtcgtacagttttagtgtcagaggggcaggtctcactgaggttttggcatgtgtgtaaagacatcaagggagtgagggacaagccgggaggttatctggaggaaaaacattccagacagaccagtgagggctgaggcttattagggctggagcaggctggcgttgatgagctgggagcaggcgcatgggtgggacccagtgagggagggggaggagcagaatgaatgggggcgccatggcagatcacgtggagtcctggtgaccattgggctgatcttggcttttatgcagaaggacctgggaagccattgcagggtgctgagcagagaagcgacatggtctgacaactcctgggtgctctgtggagagtggactgtggaggagtgaggaggaaagtgggggctgtatgcagggatccaggagagggatcctggagacttggggccggggatagcacagatgcctcctaaaggaagcactgacagaatgttcagatggattcgatgtagagaaggggaagaggccagaagtccagcatgacctgagtaactggctaggtgaggctgccaatggatggggatggctcagagagagcaggctggggtggggtgttttggatgcgctatgctggagatactgctggaacatccaagtggagacgatgagtgtgcctggaagtcgggggaatgtgagtttatgagtcatcggggtagagatggtacttaacactgcgaggctgggcgagatggtttggggcatggatgtaagaaaaagggagcctgcagcaactcccttgctgagcaatcagaagaggaagacctggcccagagaccaggggaagcatccagggtgggcaggaccaggtggaagccctgcagccacaggaagaaagtatttccaggaggaagcaggaccaactgggttcccaaagtagaggatggatcaggtcaggtgacagcgaccattggattcacccactttcacgcctgggaaggcctcgttcccatgtcccctccagtggtggcatgtggctatgggaactgtcattgagacgttggctggccctttggccagtgaaaataacgcttccatgtatcaattctgtccctgcgttagtactgatagctctaactgtcattcgctgatttcctgtttaatctgtcaagtgatctacgtctaccccctcatttcattctcaccatggcactgtaaggttaccacattttgcatctgagggaactgaggtttggaaagattcaatggcttgtccaaggtcatagttaaagaggcagggcaggatggagaatccaggacaatgaagctcccaggtacatgggtttttgaactgtgggtagttactccagtggcccggaaaactccagggctctttctcccataccggccatgtacagggtcagccttctatttttccaggtggcctcatgagttctctggagacccttagatgaatttgtagaacaggttggtaatgaccccaaatcaaaattgctctgtgctgtatatgttatgtcaatagcagcgcaaaagtgaactttgccaatgggaaacatcatgattttgctttttccttcgtccaaactgtgtttgctgaaaatccctgtcgtatggcccaaagggatacagaaacccagatctgtttaaatatagaatatataaactcatggaaatatgcacatataggattattaattctaagaagactcttgggcagatagagtgatctaagaggaccaggaaccaggctgtgggctgcctggttttgcttcctgttgcccccttgctgacaacatgaggctagctcctgccagccctagggagctcaccacaggacagtttagagagggaggacaaagctcacataattgcaaccgtgaagtggcttttaacacccgtggagccccagacctttaggacctgtcctttgcagaggctcttccctgagaagtccctgagagtgtgaatgtcccccagtctccatccagtgttacttcccagcccagaaaaggcattgcttcctctcctggggtggggatgcagcccagtgctgtttgcagagcctgtggcttataaagcctggtggtagggaaaagacagaagttttgggtggtaccacaatttgggtccctggaggctggtcccatcctgagctcactggcaaggaaggggtctcatgcactgcctagtgtagactctagtgtcagccagatgtgcccacgacctgtttctgccaaaacactgtctcttccagtataactggggcgtggccactgcccagggcttggaccagcaccaccaagccactctccaactgcagaacatcccaaggccatgttgaaattagaggaagatgccccatctgttttctagatttctcctgcatgtctgacaatccttctagccagctggatttcatgaaacccaaagtggatcttgcctggagcacattcttttctgatttttaaagccaatctgagaatttgttctggaaaatgtaatatgtgtgcttcttttgccagcctattattgaagaagggctggcaaaataccaaattattgaatttggtatctgaaaaaccttctgaggttttcttttcttttttttttttttctatctgtgtttgagtttttctttttctctcactgaaaattccacttcgccaagaattaagggactctagctcctgggagctgcctttaggtttaaacactgacagctctgcattctccccaccctgggcagcggcattgcttaacccaacctctttacacaccttgatagggagctgtttgcctccttcaaagccacagtattttttttatcaaaaaaattgtttccattatcactctttggtcctgagttctagctttgctgctatccaattaaatttgccttcctgggctgcagattcatccatttcaaaaggaccaagtcaggtggtctctgagacttcttccagccctgaagtcttgtgactttgtaggttcttaatttcttaccttatactgtgctgggaagcacccaaatctcgtggtaattacatttttccttcaacagaccattagaatgtgacctctgtgaagacaacagaaatggaggaggcgatccatgggcatcttctgaagctgttttggttaactttgatttggaagtcctggttccaggttctcctgtttcctgggaccagctccagaagttcattattttcataaataataaatgaatgcatactagggactggacactgttttgagtgctgagtatacagaagcgaataaaaccaaataccctgtcctcacaagagcaatatgcaatacggtagcatcatgccgtgggatggtcagttgtattctgtaagccccctaacaggtttgattctccataattagtttctcttgcttacaaccatcatctttaagatccacaatcattttcacctacatagtatttggtaacaatgttcatgccaaatgatatgttttactgccagacaagactgccttttcttcctggcttgtcctggaggattcatgcattcttcattaaaccctccaaacagctctctctgtatagataggaacctgatgctcagagactgatgcgtggtgatatttcaaagaaatggtcaagctaggtttccaacccagatccccgactctaaatctaggcttcttttaatgaaaagcccagtgcaaaatgaagtcatgtgtccatataacagggagtcagcttctagaatgctaaacctagaacttatttcatgggtcctaattatcagccttaacctccacccccagcatgagttaaattcctgacagatttctaaaatggtctttgcatttctataacaccaggtttgcattactaaaaagcatgctttcactttatcgtcattcattcttattctcactgtcaagccaactgtgtaatcccctggaagacatagcccaagacttgatgttatctacagattacattgccttgctccagcagttcattcaggaactagaatattagcaggcttccttcccttcagctggtttttaattttttacccccagcttaccatagcagcttagtggtgagcattctggcaaggttgtgactttaacaccatcacctgggtctgtggtttatgacaaggtgatctgtccttatccatggctgttggatcactagagtcccaggtaatgagaagagcagttaatctcacatgtatagtagtgagacctaaatgcctcctgtgctccttactaaaatgatttgaaggtgaccaagaacctcccatgaagatcacagaagagcagagtgtactggagctgaaagacatgtgttcaggtgtttgtttctctaaggaagcagtagagaatgtgaatagatgtgctacctcatctctctgatcatgtgtcctcatgtttaaaatggagataatgatcccagtctgaacaaccttgctggttggccaggagaaaatatatgagctaataatgtgtgtaaaggcactaggtaagttacaaaattctgtaccagtgtgagatcattatttgccttctataaacataaaaagtgattttcaaaaagggaaatgcatgggaatgtagaagtagctggctattttaaaggacacatgcaaaagtctcaggatacaaaatcaatgtgcaaaaatcacaagcaatcctatacgccaacaatagacaagcagagagccaaatcatgaatgaactcccattcataattgctacaaagagaataaaatacctaggaatacagctaacaagggatgtgaaggacctcttcaaggggagctacaaaccactgcccaagaaaataagagaggacacaaacaaatggaaaaacattccatcctcctggataggaagaatcaatattgtgaaaatggccatactgcccaaagtaatttatagatgcaatgctattcccatcaaactaccatggatattcttcatagaattcgaaaaaaactacttcaaattttatatggaaccaaaaaagaaaccatatagccaagaccatcctaagcaaaaagaacaaagctggataaatcatactaccagtcttcaaactatactacaaggctacggtaaccaaaacagcatggtactggtaccaaaaaagacatatagaccaatggaacagaacagagacctcagaaataacaccacacatctacaaccatctgatcttcaagaaacgggacaaaagcaatggggaaaggattccttatttaataaatgttgctgggaatactggctagccatatttagaaaactgaaactggaccccgtcctcctcaagatggattaaagacttaaatgtaaaacccaaaaccggaaaaaccctagaagaaaacctaggcaatacaattaaggacataggcatgggcaaagacttcatgacaaaaatgccaaaagcaattacaacaaaacccaaaattgacaaatgggatctaattaaactaaagagcttctgcatagcaaaagaaactatcacagtaaacagggagactatagaatggaagaaaaattttgcaatctacccgtctgacaaagatctgatatccagaatctacaaggaacttaaatttacaagaaaaaaagaacccatcaaaaagtgggcaaaggatatgaacagacacttctcaaaagaagacatttatgtgactatcaaacataggaagaaaagctccatatcactgatcattagagaaacgcaaaacaaaacgacaatgagatagtgttttgtgccagtcagagtggtgattattaaaaagtccagaaacagatgctggtgaggctgtggagaaatagtaacacttttacactgttggtgggaatgtaaattagttcaaccacatggaagacagtgtggcgattcctcaaggttctagaaccagaaataccacatgacccagcaatcccattactgggtataaacccaaaggaatgtaaatcattctactaagaagacacacgcacatgtatgtttattacagcactgtttacaatagcaaagacatggaaccaacccaaatgcccatcatgatagactggataaagaaaatgtggtacatatacaccgtggaataccatacagccataaaaaggaatgagatcatgtcctttgcaaggacatggatgaagctggaagccatcatcctcagcaacataacacaggaacaggaaactaaacaccgcatgatctcactcataagtgggagctgagcagtgagaacacatgcacaaacaccagggccagttggaggcttgggggcaaggggagggagagcattaggacaaatagttaatgcatgtggggcttaaaacctagatgatgggttgataggtgaagcaaaccaccacggcacatgtatacctatgtaacaaacctacacgttctgcacttgtatcccagaactcaaagtaaaaaattaaaaaaataaagggcgcatgcaatttggcacccagcttcattaatactaattttgcatctgtcaccttaatcttttcaagaaagccaaatattagaaaaatttggaatgtctattcaaaggcatggaaacagatcagttctttgaatgtttcaggttccattcagattttggttttcatgctaggccagtgaattttggagatactgatttctaatgagcatttgaatctgctgtgcccagagatatcccagtgtgaaatgagagcaatcatgttatcttccccaagttccaggcccaggaaatgggtagtggccaaaggcagatgatgcaactataaatccatccacattccaagagcagtgtcctaccatgacactggtaccttcctctcctaagaacctgcttggtgctctgcctgtgcaattttgaggagcacgtggtgtatacctggacaatactaccagcctctcccactgcctgtgacatattaggccatctagggatattagggtgggtcaggtgaggtggttctgaaggagaacagattggtcctcagccttctttaattactgtcctttgactatgggtctcaaacatcaaaagtgtctgtggagctgtttaaaatgaccatttccagatgcaacgtgtagaaattcaagttgacttagtctgggatctgggcctgggaatcagcattttgatgatactaagattgattcggtttgagcaatcctagtcctctgggcatgtgtcctcactcctcccgacattctgtgtggcctggacccatctgacctcagactttctgcctccttcatgatgcccatctcatggggttgttttgagcattaaattgaatgtgatgctcttgtagaaagtgtctagtctacaggaagcctcctgtagactaatatgcctagcccccttcccttgtaacaaccctggacaggaagtagaactggctttatttcagctttcctaagatgaatgacagtgctttgttcctcctaacccttttgtgcatgtatagtacaggtatgtttccatcaatcaacaggtatttatccagggcacacatcttgcagaacaggcattgcagaggcagggagggagacacagaagattcatatttcccagcacaatagactagaagcccttttttgggaggtgagacttcagcacatgaatcacatggttgccaaatggacagaacttctaagaaatcagctaatatacagcagaagactaagttatgcagtttttttgtatgctgtgaattcagggaacagggaaagcaatggtagactatgccagccaatggagtctcgaatgaactatgtggtctcttcaacccgtacattttaaatgcagatggagatgtcaggtttcactgaatatatgtgcatatgtgtgtaattcaaatcatagttgcagaatctgagggatcttccacttatttagagcctgccctattcttcccatccttcctgcgtgtcacctgacatttagaaatcagaactgtagaggtccaaggagacgaaataccatcttaggtacagaaaggaattcagaattagaagcacataaacacagaggataagtgtaatgacatttaaatatttaattttaatattttagccaatctgtatgctgtagatttctagctaaatgatgtttatcacattctaatcatgtaattggagggttggcaggaagtatggtgggggtggggtgttatttaatttaatggccatgaggctcagcttcaaaccaaataatgagcagaatgcaccttccaaagagtgggtggaagcaggcaagaggtccaagaggtctcagatgagccccatgtgactctggggttctttaatggcgctctctgcattcttgccctgtcctctctcagccagatggtttcagtagttgatgctgttttccatctacagcaagctattctcatctttccttgagtaaacacttttactctttctttttactgctaccatttaacattcacacagtgtcagaaatgtgccaggcagaggctgtgcaaacctactcagatcatcttgcctagcgaacttaaaattaattttaaaagggaaaagaggttgactgttgcagacaaaagtggaggatgacttaagggatcagctatgactgttttattatgccgtctagaaaatgattttgaggggatccacacggttgggccaattgatgtaggaacgaggctgtatgtctgcttagcttattcatctacctgctgaacacttaagagcattgtgacaggccctacaccgggcactgggaaatggcagagtcacctcctgcttcagaggagcacacagaaaaatccagcattgcccacgtcctacaaagcacagagaaatgggccattgactgtaacatggaggtggaggtctgagaaggtgcaactttaatgtgcctcaaagagtgggtaggtgttcaccagatagctgagggaggagggcagcctttccatgcaaagaagatagtgtgtgctaagatgtgaaaatataggagagtgaaagcacaaggcacactgagaaatcagcaagcacaggacaggcctaggagaagtaaaaagttgatgtcgtgttttgggaacagtttccacccctagggtgtcaggtgatcttttaggccataggaagtcatcagcaggttttaaggtgtgtattttagaaggatgactcaagtggccatggaatcattagaagataagagagagattctagaatcaagatgacaaggatgggctcttctgggttaattgtgacttttttggtgacctacctttgtgcagttgtcacagacatggctgtttgatctgccaagagtcatttggcccagttgtttgagctgtgatgttagtagttggccaactactaactgtgtttgctttccatgcttgccagttgaccttactccttgaccagaaccagcctcctagccatggttaagcttcaagggtgggtgggtgggaggaagtgtttggacctgttttacccataaaactaaggtagagtacagatttcatggacggcattgcccatgggattatagacactctgtctctttaattgcaggccatgaaaacaaacaggggccaaacatccaatgagaattaaacatcacacagtgcaggtgctcttgctctgcctgtataaccagcgatagcaggccccagatgtcaggactgccagcctctcactggcccaggcaggctgtgaacgtcagttccactgtgtgagaagcatccttgagtcatccagtccagcccaaccccagagcctaaacatgctttgatacctttttgttcaggactgcccaagtttgaatggcagcttttcaataggctccatgcatagacaagttttatttcatttgtattcctttcttagctgaagttcccaccaggttcctggttcacatttttcaacccactgcatctcatccattttctttatttccacataatgacaaccactttcatagattgcatgtcaacagtcttgggtgttttacatgagttaattcattcagttcttactcagaaccccaagaggtcgaaattataaccctccttgtagagatcggtccaggggaactcagggaagctgaagcacctgttcgtgcctcccttctcctgtttctccctggtcggtttttccatcccccctgggagcctgcttcctttctgctttccaacatattctgcatgcttctgttgcttctgcttcccctgtctgaaaaggaacttttctctagacccagctactccttccagcttcagcctggttctctcctactcttgccgtaactgtatctggcagcttcatagaccattatacgaattcttaggatctagagtcagccccaccagtgacctctgcctcatctccaccatgaccttcccggggacactctcctgtcttggcttctgggaaggagggcaagtctggcttccctcctatctcagtgcccacaactttatccctgcctgcgtctgctcttcctctccagtcctggaatgatgtgtaccccccgaaaccaatttcacgaacccctgttcctctctctgggaacttatctcttatcctgttcagacaggccccaactgcaggcatattctgtctgctagatcactagataaaatctcttcccattgtgggtttcagtgacagccctgccacatcctcattctctcaggcaagcaaacaagaggcacctttggctcccttctcccagcctttcccttcatacccaagtggacaggaagtcttcctagatcttcaaccctggaggcatccccactctggagctccttcctccagatcccatcacggtcagggcccctcaccttcctcctcctaggtccatgtgtcttcaggtcatcctgtgctcagagactgaggcagcccacggaattgctcttcttaagtcgtcacctgcctaggaggctgcagtggctcctctgccaactgttgcatcaagtccagcctgtctgatgctccagcttctacccaaagtgccacccgatctgtccatcgattcctctttcccttgactcctgacgtagtctctggcttccaacaagcagatcttctaaggttgtccccatcccctcgcaacacctgctctgtggttccatctgcttctccttggcctgaacaccctctgagcatccttccatctctcatctccagccatcctctgagccttggctcaaatcttgatccatctaacttctgaaattaataattaaaacatgttgtctgtaatcccagcactttggaaggctgagacaggcagatcatgaggtcaggagatggagacaatcctggctaacgtggtgaaacaccgtctctactaaaaatacaaaaaattagctgggcttggtggcatgcacctgtagtcccagctactcgggaggctgaggcaggaaaatctcttgaacctgggaggcggaggttccagtgagttgagatcacactgtcgcactccagcctgggtgacagagcaagactccatctcaaaaaaaaaaaaaaaaattgtctcttagagtaacacatactcattgtaaaacattttaaggaacagaaaagcatacacaagagataaaaatcacttataattctgccacccagaaattaccattataatgtgtatggatccttcaaagaaataaatgtgcatgcatataaaggtaatattatttttacatgactgatattatgctatttatcttctgtaaccactataatatgaaatttttcctgtcccactaatttgtcttaaaatagcatttttaatacctgtataatagcctttcatacagatgtgcaattgatttatttagtcagtcttctactctaggtcattttgtggcttccaccttttcagcattataaataacaaatgtccctatttcctatctctagtcatttgttttggacattatatgatttagaattttttgtaatgcagaggcaaggtgcatttattgagctactgcggagtgccagcatctatactcagtatttccctttctcacataagccttcagagcctccttgcaaagtagatagtatcaatatctccagtcacttggcttcagtcacccagttgctaggatatgaggttcaaatttggctcagcctttgatcccaaatctaactggcatcgctctgtcctctcgtgatggtgttgacagtacaccggtgcgcatctgtgggcaagctctaagtgttaatgaagggaagggatggtttcatttattttattaccattttccaactgggttataagatcctcctaggtgtctgatgtatacattagggttaatcttagacctaatcggagctggaagggattttctcattttataagaaactaagaggtttaagaagtatctacagtgtcagattgtaagctatattggacagcctacagtggacacataaaaacatcttcaaaaagttattgtcggctgggcgtggtgggtcacacctgtaataacagcactttgggaggccgagacggatgggtcacttgagatcaggagttcgagaccagcctggccaacatggtgaaaccttgtctctactaaaaataccaaaagaaaaaaaaaaatacctgggcgatgtggctggcaggcacctataatcccagctacttgggaggctgaggcaggagaatcgcttgaacccaggaggcggaggttgcattgagccaagatcatgccactgcactccagcctgggctacagagtgagactctgtctcaaaaaacaaaagagtattttctttataatatagactttcttttctgtgcacatgtgtcagaatctgtagctgtactgaagtgcagtacaggctgccttgtccaaggctgcagttttggtagcccctgtactgcatcagtgttgaagaatcaactgtgaagccccatgtagctcacctgtgaattccttgatttacttcaggtagagcagagctatgagaaggctatagtcccagcttaggatttcattccgcagagagttaaaatctcaatttttcgttgtctgtcacctaggtctgtcttctttaggcaggtgtttctcagactgttttcaatagggctggcaagggccctgtgaatttctaatttctgatttctaatgagctcctgggggataatgatgctgctggttgcagcccacacattgaaaaccattgcctttggccattaaatatatgtatatataaatatatatatataaatatatatataatatataaatatatatatataaatatatatataatatataaatatatatacaaatatatataatatataaatatatatacaaatatatatataatatataaatatatatacaaatatatatataatatataaatatatatacaaatatatatataatatataaatatatatacaaatatatatataatatataaatatatatacaaatatatatataatatataaatatatatacatatatatataatatataaatatatatacaaatatatatataatatataaatatatatacaaatatatatataatatataaatatatatacaaatatatatataatatataaatatatatataaatatataaatatatataaatatatatacaaatatatatataatatataaatatatatacaaatatatatataatatataaatatatataaatatatatataaatatatataaatatataaatatatataaatatataaataaatatataaatatatataatatataaatatatataatatataaatatatatataaatatatatataatatatatataatatataaatatatatataaatatataaatatatatatctgtaggttatacagttaacttggtgtttttggccccactgtttaaaatggcaaaacctgtgtcattcaaaacctatgtgattcgaatcgttcatcctttacatcttttgaagtccagaatgtgttcatcggtttgtaatcagcctagttatgggcttgagcctcttcctgctcagcctcaggtcctcccaccaccagctgcagtttcagtcccatccaggcctgagtccatctttctcaagccaggcaatgtaccgggcacttcatctgagcaacggatgcccagaaccttggatctcgagagctgaggttgggtgcccaggacagtgatgttctcactgaactacagggtctgctgttgcctctctctgcccctaatagaccacagccatttgcctggagtcctggactgccaccttgttagcttttgacagtcacttctccataggaactgcttctctgctctgtccctgagtggcatctagaatctgtttaaactgcctcagacctccccagaaccccagtatctcattgtagcacccacattttactattgcctggacttattctgccatccctaccccaaacatcagtccagggacctggcacccacttctgatagaggtgagtttgctgtacccccatcggactctgaaattgtgctgccgtccctctctctcctctcctggggaagtcccagaagctccccagtcctgctgctatgaaatgtggtcgtgttgtcactgggaaggagtccccaacctagttgactgcaataatccagacttcctagtacagtgtctcatcctcagcagcactgacattcagaccagatcgttgttgcttggaagtgacctgtgtagaatgtttagcagtgtccctggcctctactcactggattctagtagcagccccctaccatgtaaccaccaaaaatgtctccagatatgtcacatgtctgctggggaggtaacccgtcctctccctgcattaggaaccactgctttgggaggccgaggtgtgcggatcaccagaggtcaggagttcgagaccagcctggccaacatggtgaaaccccatctctactaaaaatacaaaaattagccaggctagtggcgggcacctgtaatcccagctcctcgggaggctgaggtaggagaattgcttgaacccggaaggcggaggttgcagtgagccgagatcacgccattgcaccactgctttagagcatttgtgcattcagcagtttctttattgttgtgaagcaggttctttcaccaatggtgactcactgaatgctcacataactccatgaaatgattggctttagccccattttacagatgaggcagccaaagcctggagaggttatatgtgaaaggataacacaggaagtgccaggaccaagatttgattccaggctggtctgacgtcaaaacccatgatcttagagatgagtggttacaaggaaaagacacccattgatagggtttattttaagggtacagttggatagtttacaggcaggtcgtgcctgcatctttctgcacagtggcttctcctcctggcctctgctaccctccctgctttagcttcggtgccagccccagcccccaaccttattaaagtctcttagtctctgtgtctgaaatccagattcccaggaaaaaaactatgtgattggctcagctcgggtgagtgatttgctcaaggttcaataagcggtgtgtgttcagggtgggtttggtgacggaaggaagtgactggtttctccagtacccccaagctcttgcaactgaccctaagctaccattgccctgctgtcaccatggcaacggaggccaattctgcccaacaccttgggacaaagattttaccaaccagtgcctaggccacagcatcctacaaagtgaaaccactggagatgtgggcagacacatctgtttcttccatttagcaaacaagtggagctagatcagccccccagaaatcgatctttaccaagacttaatgaagagttagctagttaatagcccatgacaaatccaaacgctgttagaggtctgacaacctagatattaacagcagcagtggccagtttccaagagattactgacatttagggccattcaggaagacatctgggaggaaatagtcatggaattgtttaaggcccagctagggaggcggggaggaaaagaagactcgacagctttgtaatgtacagtgacactggcacctcttagcaagagcacaagttgctcgtgagctttttaatcacagaagagttcagaacctgaaggagcagcaaatgtcagcggaatttcttccagcttaaaatgaatccagcaggcccctagatgcccagaaccctagtgctgtctgagatgtttccaggggtcattgcctcatgaccgggtgaccaatagtcaatgctcctgatcactaagctgcacacttaggtgactgtcacaaacaaataagcatggcctttagcttctggtcttgtggactttttctggtgatgctgcctctgctctctgcttcgaaggtgttagcacctgtggccttttcagtgccttcagcaggtgtggatagtgcacctctgtgggctgggcactctgcccttgaggagtcgccagccacagagggatggcttgtttgagaccaggcagatgacaaggcaatttattgcaagctttaagaagagtggaaacaaacacacctagggaacacattttcagacttgtctgagcagatgcgatgttgtcacagagtccctgcacacggaggcacggtgccaccatccagagattcaggaaatgcctcctgctctctgggaatgcacactggtatggtcggaagtggatacaagcccttgccctcattacccacatcttacgtgtcagtaaatgctctcagctctgtctccaaattacaccccaacccattacatctctatcttctgtccactgtgctagtcctggccactatcactaccaccaaccatatcatgtgtccactctgtaagccattactcactcagcaaccagaatcatcttttaggtcacgtccctgcttaaaatgttttggtggcttcctgttccacataggatagaaccctgactgcttatcacaactgggagagcctgccttcctcttcagcctgtgtcttgctatgctgttacggctcgggatgatgtagcctcctggcccctcttgctattcctcacatccatcaaactcactcccacttaagactttcacgcatgcttttccctccacaggtgacactcagccttcagacatagtcttcttgtctctcaggccccagcccaaatccaccttcttagagcagacttctctgacccatccaaagttgccttctgccccacgtcactctgtcacatacacctgttgtgttttctccatagtattattacctacaattttcttgtgtttttctcttactatgatagaggtgcaaataatcaggggaattaagtaaggcatatagtatgctcagggtccacagtgaggtgaaggcttcagggcagtggtaacatttgagctggaacttgaaacaggtgtgatttgccaggtcaagaggtggatggagagatttcatcagaggcaacagcatgtgtgagggcccagaggctagggaatgtgtcacccttagggaacagctttgggacagcatccctgtagcctggactgcataggaaggcagagcaagagtggctgggggcatttagacttcatcttgtgggcagttggaatcatcagtgcacagggagggattcactagacctcatggatttgctcaatggaaccaaatagggtttgaaagtgtaattgaggggttttttgatttggaatatttttattccaattttattaggagccaagcctggagagggagggagagtgtgctaagaccaggagcttcagtttggagtacgaatcaaggaggggctttggagcatgagagcttgtcttctgatcccatcgtgaaatgaacagctacgtgaccgtcttgtgtgtgctaggttcgtgcttgtatctgagagatgagaaatggcagaaggaacagccgtgaaatcagcagattaactcttcaaagaagacacttacattttccattgatggcctcctccctctccttttagttcaagctggacagaaacaaaagtgctgcgtgatgagggttagatgctctttgtaattctacagcaatgagtcttctttttaaaacacccagatgtcagtactattttgggcagatgtactggggagcagttggtgatgacctcacgaggctgtgactttaaagaccaaatgacacagcttttgagtaaagcaggctccggtctcctaatccccgggctccagggttctcgaattcagagcaaaagtggtactccacactgcccgtgtccctgctcatcgccatatccccaacccctccttgccccaagctgctgagtgtgcacagaacttgtgtggttggtctggggctctaagacaagtttccttggacagacagcctgtactcagctgggtgtccatgctcctgtcatccaccttgagatggggtcagcattgtatcaagttctctctctccactttgagcctctgttcccttatctcaggaaagagggtgagcaatacctacctggagacactggaagacagattggccttttgcattctgtaagggatcatatgaatgttcattattatgacttctggcttccagagcataaatcctagactcacctgggtaagaactagataggacctcagggttcatccagtccaaatgccaggctagtgaaagagttctttctcagcagtttccagcaagcagtgaccagcctcagattggataccttcagtcacagggagatcgctcttcccaaggttctttattccagccacatatacacaggattcagtgttaaaatgcattcccttatatgcagcctggctccatgtaatttccaagttcttgtctttccctctagagctgtgctgtcccagatagtagccactctgcatgtggctgctgagcacttgaaatgtggccagtccacactgagatgtactacaaatgtaaaatttatacataggcataagtacattttatatttatataaatacattttaattttttttttccttttacaggttgaaaggataatattttggctacgttaagttaaataaaatgttgttagaatcaattttacctgtttccttttacttttatattgtggctactagaaaaatttaaattatataggtgacccacattatacttttgctggacagtgcggctctagaactttccaaaataaactagatccagcccttttatctaacagcccttcagatgttttaaggcatgtatcttatgcccctaagtttttctggacatttattcacaagtcttcattgagtgcctgctatgtgccaggcaccgtgtagatgctgaggtgggatgggatgatgagcaggaccagcacagtcttctcactcctggggttacagtttgatggggagatagacatcaatcacagcctcacaagcaggactgtgcttccagatgtggcttcttggagccccctttttataatacactttttatttgacaatagatttacagaagagttctgaggatagcacagagagttcccacagaccccacatccagtttccaccatgattaacatcttacattaatatggaacatttgtcacaaccgatgaccagtatcaatacattgcgatcatctgaggtccacattttattcagatgcgtgtagtttttcgctaatatcatctgttctgtcccaggatcccatccgggacaccgcattacattgagtcatcatggctcctttggctcctcttggctgtgacagctcctcagacttttcttctttctgatgcccttgacagcgttgaggagtactggttaggggttttgtagaagctccctcagttgtgattttatgttttgttttgttttttttgttttttttttttttttacttctcatggttaaactggggttatgggtttggaagaggaaggacacagaggtaaattgtcattctcatcccatcatatcaagggcacatacaatcagtaggacttatcactgggggtattggctgagggagtgtttgtcaggtttctccattgggaagctgccctcttttcctctttgtctgctgtttggcaggaagtcacggtgtgcagcccacacttacagagtaggagttgggctccacctccttgagagtggcacatctacataaattatttggaattcttctgcatgggaggcttgtctgttctcaccatccgtttattcagttattgattctgtcagtatagatgcatggaaatctatattttgatttacaatccagtactgctatgttttgttcctcaaggcattccagctttggccactgggggctccttcagttggctgctgtgtccctttgacgtaccccatcgatgttcattttccagcaactttttactttctggctctatgagatgctctagactcatgctgtattaaaatggggatgcttttgtgcctgtcttgtggagctgtcctaaaaattgaatgatttactgcaagtaatgcttatttccctgcacacttctatgtttgtttgtttgttttaacagttgtagcaccacagtgaatctttagtcaagcaaaaaatgatcccaagtcttttttcactgaaatgctttttaagtcaaagccctctattattgtttttttcagttctgggatacatgtgcatgatgtgcaggtttgttatatagggaaacatgtgccatggtggtttgctgcacctgtcaacccatcccctaggtattaagccccatatgcattagctatcctgatgctctccctccacccacccccgcccacaggccccagggtgtgttgttcccctccctgtgtccatgtgttctcattgttcagctcccattatgagtgagaatatgtggtatttggttttctgttcctgcattagtttgctaagcataatggcttccaggtttatccatgtccctgcaaaggacatgatcttgttcctttttatggctgcatagtattccatagtgtatatgtaccacattttctttatccagtctgtcattgatgggcatgtgggttgattccatgttcttggtattatgaatagtgctgcaatgaatattcacatgcatgtatctttataatagaattatttatattcctttgggtatatacccagtaatggaattgctgggtcaaatgggaattctggttctaggtctttgaggaatcgccacactgtcttctaccatggttgaactagtttacattcccaccaacagtgtaaaagcattcctattcctgcacagccttgccagcatttattatttcttgactttttaataattgccattcttactggtgtgaaatggtatctcattgtggttttgatttgcatttctctaatcagtgatgttgagctttttttcatgtttgttggctgcataaatgtcttctcttgagaagtttctgttcatgtctgttgcccactttttaatggggttgtttatatttttcttacaaatttaagattcttcttatagattctggatattagacctttgttagatggatagattgcagaagtttcatcccgttcagtgtgttgtctgttaattctgataatggtttcttttgttgtgcagaacttctttagtttaattagattcgatttgtcagtttttgcaaagccccctagtctctacttgtgtaggttttttttcctcttaatgcagaacttcctttccttattcattctcatattgagtattccacgtcgtggttgcatccttttgtgatttcctacagtgttgatttgtgcattccacctcatacactctctgcatttgacaaacaggtcttgccatggcagacaagagaaagactgggccacatgcagcctcttgagctctctgcactcatcaccccacaggcatctgcatgtggccccttctttagccagcatcccgccatcttgaatcgaggttatcaggaaagacgttgtcacatgagattcaccgtctatcagtttttccctaatttattcaatctaatgaccttatgaaaatgggaagtgaggttagtcagattcgatttgtcttcagaacacccctttgtgctcatatttattgcctttattttattttttagaatccacaaaccgtggttaacttcactctgtaattttgctaatgtcatttccagaatctgtgtcagtctttaaaaactaagcagttacctagtgccagtctaggtggtattttctctgtttttccatatttttcccatgtagtctttgttgcgtctgcagttttgtctgcatctagtaacacctggggcttgcaggggggacttgaagtcatttgaagatgtatcttccttctttcccctttatttccaggttccggttccttcgtaaccacatttgttcagcctttgggggttgaagagcattatccttgaaggcaaaataaagcatacagaattacagttaagtgaatacaattccttgctgaaccatctgctctaaattgaagacccatcctttgctcctgcttttttctgctccaaaaaaaatggctttctgagatctttgcttttcagaaccttagtctctcttgggccagagcagggcaaataacttcgcttagaagtccctgccacgcttctatatccatccttaaaaataggacgctccttccatcatttgtcactggaaattctaagttgatccaagggttctcttttaaactatagactcatcttattacttcctcccatgtagtattagtgagagtgtttattttcttggacttccttctctccaaagccatgttccctataatttccctttcaaacaatttgcaattgttctaatatccagttgaggtctgttcagaccttcaccgctctaccttcacttttccgctgagaaaaggcacctcttatcactgtcccctgcctaagaaagccttgctggcagcagcatgggtagggtttatgggagtacctggacttcaggatcctcaggataaattgcagcatccagagttgattggagagaacaagctcaaccccttcccacttttagctttctttactgtggaaggatttggcttttaggtttctttactgtgttacccagttaattctttcataatggaaagacaaacatcatgtcagtttctccctcctgccagaaaatacattcccaaacatctcaaggtctccctgtctgtgcccttccagaaggtagcccttgcctggcagttgcccttctgggctatcagagcacccagccagctgctctgctgtgcccgtctcaggaagcctggcaggcacataagtccattcttagctttctgtcattccaagccgaaggtgctggggcctgattgccacctggactgccggtaagaaggctggaactcgggcaaggctgcagagggaagagtgggtcccatgccccttccctagggcagccctgcagcctggcagcccgtcatttcactgagcaaagggatctcaggaaaagccagcttagaagagagattactgtattcgttttcttattactctcaaggtgcttgctttttcctgaagataatggttagaactgagaatattggcaggctccaagcatcacacacagtccttggaaaaaaacaaaatacagtggattttcactcccaacatggagagggtcccagggactgatgtgcctatcttcccagaagtgcagaagcagaccaggagaccagtccatctgtgaggacacagtcccagagagatagattttcctcaggccccacctttggggatggagaatccagccccatccagacccagcgcttgagcctccagacattgaccagaatgtctgctgcttcttgatgcgagttctcctagaacctcatgtgccagccagctaaaagaatcactgatcatcagaggctgcatgagctgtcagagccatcccatttctcagtggacaaatgagcacatttggttgcagaagggagaggggccttgccctcggcgacaccaggggactaacagaacctgaatgtggacccagctttgatgatggttaataataatgcttattattaaacaaagcccaactctttgctgggcagtgttcaaagctaatggcatttgccatctctcctttttattgtaagtatgatacatcctattgtccccagattcccaggtgaggaaacaagaagcagagaagtggtgtgacttgcccgtggtcacacagcgggtaaggggtcagctgaatttggacttgagcctcatcatcactattgattaaatgcagccatcttctaatgctgtgctaggttcctgtataagcgtgagagtgtgtgagtgtgtgtgtgtgtgtttgtgcacgcctgatccgtgtagcatctctagaaggtggagggtgtttccacagatccagaaactgaggtcaagtcctgagagtctaagttcagtgccctttctactatttaagggaaagaggcctgtctgtgagttctaaccctatacataaagaataaatggggttcattattgagtttttccccttttattctgtaagttaaaatcaaccaaatggttgagttttacccctcacccatcccctaagcccattccttttaagggaatggccttcagatgaccttgaagataggatgttgggtgtcccgcagggtatggctacaccccactggatgaccccacctgctatcccatggaagagaagaacaggcaaatgtggcccatcaccccattcacgtagggacacctagtgttctctgggagatgaatattccaaacccacatcaccatagtccccatcagggataatgctttcctggggctgcagaaacaaagtaccataaactgggtggctcaaagcaacccaaatgtattctttcacagtcctagaagccagaactccacgatcaaggtgtcttagggttaacttcttctggaggctctaaggaagaatctgtgcctgccccgcctgccttctggtggttgctggcaatgcgaggtgttatttggcttagagacacgtcccttcaatctctgcctgcaatggccttcccctctgtgcctgtgtctttctctcctttctcttagaaggacatcagtcattgtatttagagcctatcctgagatccttcatttcatcttcagtgactcttatttccaaatgcatcgcactcacaagtgctggcgtcagggttggagcagtatctgtttgaaggcactatccaacccactctgtcactcctctgtcatggtatatcagcagctggggaagcagttggaagtctcggggtaactgagctttcccctttccatctccaccctctcttaccaagtagatcaacctcttccctaggggggtgtttcctgtcacagagaaaggccaaagccagcgtgctagaacaggtttctgcaaggacactgttacctgtctgtttccaagaagctgtcgggtgccctgtggctgggctggtttagctttctctctgccctcaggcagggggctgggttccataacttcccaaagccctttgcaaccggggcacacaccactttctctggcagcatgggtccatcctcaggagtgtcacattccccatgcttcttccgtcacccttgtccagcacttttccccagggcttcacaggacacatgcctggccctcagggaaggttgtcacttcactcattatcccgcctgtgagcagcggctggcagtgtgcccaccgtgagctctgtgcccccgaccagatggcacacgaggagcccagggctgctcattccacagtaagcctagtggctggcttccctggatttagatatcaaaattcacattggtggagagaagagggctgtatcgatgcaggggtctctacactgaggcctcctttagcacagaagaccctgtgacctcatcagaccagcattgctgcccagagccctaacacagcctgataagtgcatatcactgtagtcagtcatgcatggcttaatgatgaagacactttctgagaaatgcgtcgttaggcaattttgtcattgcggggacatcacagggtgtactcacacaaactcagatggtgtatcctaccgtacacctaggctatagggtgtagcctgttgttcctaggctacaaacctgtacagcatgtgactgtactgaatactgtaggcagttgcaacacaacggtaagcatttgtgtatctaaacatagaaaaggcacagtaaaactacagcataaaagataaacagtggtacacctatagagggcacttaccatgaatggagcttgcaggactggaagttgctctgggtgagtcagtgagtgagtggtgagtgaatgtgaatgcctaggacagtattgtacactcctgtaccataggctacactacatttatttcaaaaaaattttcttcacaaataaattaaccttagccagctgggctcggtggttcatgcctgtaatcccagtagtttgggaggccaaggtaggcagatcatttgaggtcaggagttcaagaccagcctggccaacatcgcgaaaccctgtctctactaaaaatacaaaaattagctgggcgctgtgatgcacgcctgtaatcccagctactcaggaggctgaggcacgcttgaacctgggaggcagaggttgcagtgagccgagttttttttttttggagacggannnnnnnnnnnnnnnnnnnncacccaggctggagtgcagtggcgcaagctcggctcactgcaacctccgcctcccgggttcaggcagttctcctgcctcagcctcccaagtaactgggactacagacgcacagtgccatgcctggctaattttttgtattttagtagagacggggtttcaccatgttgtccgggctggttttgaactcctgagctcaggcaatctgcccgcctcagcctcccaaagtgctaggattacaggcatgagccactgtgcccggccggtactttttaataaaatttttatttttgttcactttttaaacatttttgttaaaaactaagataaaacatacacattaaccttggcctacccagaatcaggatcatcaagacataattgggtgatggagattttgcagcttcattattatcttatgggaccactgtcattgtattcgaggttcatcattgactgaaacatttgttacacagttcatggctatatttggatctgagctcctgcaggcactgtctcatattttgacatccacagtaattaatgacgtgccttatacgtgttcggtgagtaagtgtttgtaaattaatgtttgtgaattagcattttccctcttttctacctttgcactggggtctggtatacataggtgcctaataaatgatccttgttcttctgggtttcccctctccttcaatgagtctaggggtgtttagaggctgactggctcatgcccacagctcagccctaataatatttcaggaccacaaatatcagactgagagtggacagaaatgaatgtggacatggatgaaagggagggcttgtctgagttccatcccagggatcaaagaggaagagatgcacagcagaagagatcttctctccactccccactggcatttgattcaaactcctagttccttagtagctgcccctctgaaggtcctgagagactgagacttcccaagcgtttgttcactgaatcactccagaagtgtcctcttactgggattagctatgaaatctctaaaacccaaagagctaatagggctgttggctgttgggaagatcctaagaaagctaagaggtggaggaggtgcacccactgtccatccccactggccaccgtggtggagatggggagctacaggaggttccaggccctcaggaaagcagagagttgaacagcatgctagcaaaacaggccagaaggaccaggagcctgccgggttgtcctcctaggcaacccatcaccctgttagacgctcctatgggtttgtttgtggatgcacatgtacatccttacacaagggcctcccctttgggggcgacaagggtttagctacatggtcatgtcaaggctctgggtgatacagggcaagatctggattttggcaaccctgtggcagtcacgcatctgccaccatccagatggcattgacagacagcgccccaactcacacccagccctccctggagctcccactgccttacgtcactacatgttgccccgggcccctcctggaggccttgtcaaaacaggatgaagagcaaaccctgaacactggggaaatccaactgaggaagacctgagtgttacctaactctgagccttcaaaatcctgtactaggacagcaaacacacacacactattctgattctgttccgggaagggtttcagatggtaaaagtttttgcaaaatgagtgagtaagtggcagttttatggaggaggtgacatttgcattctgtctgaattttgtggggacagctcaaggagcaggctgacctgggtccaagtcgggtcagtcatcctgggaaaagcaaggattcagtggcctgaatcatgccaggcagggaactctgcaaaggggcccgagtgccgtgtggtccatgtgggaagtgtgaattgcatccggaaggcaatgaagaatcaagccactaatgagttttgaggagggggttcgtgtggtcaagtttgtgtcctagagaaggcaactctgttggcagcaccttagaaggcttggaaagagaagggcttggcaacaggagactggttggcctgaagagtgaatttctaattgtggactttcagacactggcaagctgttaggggagttattttggggtggcgagatccagagctgtggtccagaggcagtctctgacatgccaggtcactctctcgggctccggctcctgtacctgactaccacttggagcgtggctgtgggtgttatcattgtggtccctctgctggatgctcattaaggctttccctggaaatcagtgtccaacctttctcccaccacagggcagccctgggatggcttctgaatcagggcctgcccgcctcctgcaggtccctctcagtaagtcagaaggtacagctctgtggacccagacctttggaacctcagcatttctcaaagtgggagttggtgagaagaaaaaccttgggacagaaaacagcttagcctgggctatcaggtcacccaaaaagaacaaccaaaatgggcagctcagaataacgccttaaggttagctcaggttctgcttataaatactaagctccaggctagagggaatttatccctttgggaaccagatatgctctgatgttttaccagggttcattttgagaacatggtcatgttaactgagagtgtggacctcagcaaagatggatgttttattaatgtgacagatgctgatcgggaccccttgtgcatagatatccagttaaacccatttcagtccaaaccctggaaatgtgggtggagtcctcggtgtaatggcatggtgtagtgtcagttttctcaaagccagacaggctcagctgcaaatcccagctctgccacctgttagccaagtgacctggacatgtgtcctaacctctgcaagcctctctttccctgtctataaaatgggaacagtaagaaccattacagagggttattgtgaagactgaatgaaattagttaaactccacctgcagttggttgctttaagtagtgtaatgaaactttttaaaaaatgggccgggtgtggtggctcatacctgtaatcccagcactttgggaggctgacgtggatggatcaggagtttgagaccagcctgaccaatatggtggaaccctgtctctactaaaaatacaaaaattagccaggcatggtggcgcgtacctgtagtcccagctactcaggaggctgagacaggagaattgcttgaacctgggaggcggaggttgcagtgagccaagatcgcaccaccgcactccagcctgggcaacagagctagattccatctcaaaaagcaaacaaacaaaaaaatcatgaagccaggcaggcattgttttattgttgttgttcttttgtttgttttttgctttttccattatcctgtggaaccctttgagcagcctatgaaaggctattcccattttatagatgggatgaacacagtttagggatgtgtttactctgaggttatcagtgactgagcataagttaacctctccaacagcctgatcttgcatctgttcaagccatgagcctaacactagagatagtctcctaacagagccctgctgaggctttcatcagtgacccccatggaggcacctgatgctgaacttggcttcgaggtcctccccttctccccttctcgcctgctgaaccttcccagagcgtaagaggtagttgggaaatgtttttcagatcttttgactgtttttaaatccaattacttagttttttttgctgttgagttggttgagttctttgtatattctggttattaatcctttgtcagatgaacagttttcacatattctctcccattccatgggttgtctcttcactttgttagttgtttcctttgctgtgcagaagctttttagcttaatttaatcccatttgttactttgtactctggctgcctgtgcttttgaggtcctacttaagaaatctttgcccagaccagtgtcctaaagtgtcttccccagtgttttcttctagtagttttatagtttcaagtcttacattcaaacactactcacgatagccaagatatgaaatcaacattagtacccatcaacggatgaatgaataaagaaaatgtgatacatagacacaatggaatattattcagccaaaaaaaggaattaaattctgtcatttgcagcaacatggatagaactggaagacgttatgaaataagccaggcacaaaaacaaatattgcatgttctcacttatatgtaggagctaaaaacactgatttcatggagggagagactagaatgatggttaccagcagctggagggtagggaggaaggggaaatgaagacagattggttaatgagtacaaaaatgcagttagagagaagaaatacatttcagtgttcaatagcacagcaaggtgactgtagttaataatttattatatttttaaaaatagctagaagagaagatttgaaatgtttccaacataatggttgaggtgatagatataccggttacccacgttttttgtttgtttgtttgtttgtttgtttttgcagatagagtctagctttgtcacccaagctggagttcagtggcacgatctcagctcactgcaacctctgccttccaggttcaagcagttctcctgcctcggcctcccaagtagctgggactacaggcgtgtgccatcacgccaggctaattttgttttgtatttttggtagagatagggtttcaccatgttggtcaggctggtctcaaaactcctgacctgaggtgatccacctacctcggcctcccaaaatgctgggattataggtgtgagccaccacacccggccatttacccagatttgatcattacacatgatatgcttgtatccgaatatcacatgtaccctataaatgtgtacaactattaggtattcataaaaattaaaaataaaatttttaaagaagagttaggatgaatggagacaaactggagtctcaactccagtttttctgcaaggaaaaaaggaggctaggctaaataattcagtagagttgccataactgtatggccgcctttcccaagtggcccctatttcctgcagtaattaagggggatccatgtgctcaaacccctttatagctcttttcaagaaatcatgttatttccttctttttttaacaatgttattgaggtataatttatataccataaaattcactcattttacgtgcacattttacagagttgcacaaccatcaccaccatctgatattaaaacatttacaactattcctggtttaaagtggagaagaagttatgtgctggtcctgttgagcccctcactgggaagtttaaaagaaaaaaggtttcctgagcctgttaggaaaggcagtgaggacacggctcagaggccaggaagctcccaggaaactttccttagatggaaagtagtgagctttcttacgggcaacattcacaaaggtgaaaccaccagaggaggagtggggaccagccaccctccatccttcctgtgagagtctccagtgtgggagcatcctcagtggagggcaggatttcttggagaagaaattccaaacagcctccaagcattaacctgctgcatccctcttgaaggaaggggaagagaagaggccaggtcaagtctagattccagagggggagttggtagagaggccaagcactcataggatgccctcaggctcttcaggggaagagtgacccaacggaaagaacctgttcaaatcctggcttcaccagttaccagctctaagcctcagtaccctcatctcaaaaatcggagaaaattgttgtgctgtttctggcattttgacaaagtgaatgacaatatgcatccatagggtctgggatgctgaacaaacagccacaatttcagttattgttaaagaaaacagcttctgagaaatgcaaaacctgaacactcttgaacaagacatatctggtttattgcaagaaatgagaatgtgtcttactggtgagttcaagtccatattcttctatttactctgtttgtgtggatctggacaggttgcttatagaagcctctctgagcctcagtttccttatccatgaagtgggcctaagaatagcgcctgccttgtagaattgagctgaggagcaaatgagacaccgcacggactgtgctcagccagggcccattgcctgccgggtgccctgtcaaggttggccgttgtcatcagtgtcaccatcactgctgccctctctatggctggcagtggtgaggacttgttgtggccgtgttttcaaagggaccttctgtcccagatcccttgggtaccatcactcaatattgcaacttctctgtgcgtaggaaactccctaactcaaacctgaaaggacaggcctatggaggagcgtaatgagaactcatatgcagtcccagggtgtctcagggagtcttctgggagtttgcttcttcacaccttgtatgtaaatattaggagagaagagtgagggagtcagctagagcttaaataggagaaatgttgaggaccagtctcactgatggcaaccaggaggtatgtttttgcaggccatcatgcccactgctgtgttgccacaaacaccccctgctccctcaggccaagggaataggagcccagagccctgtacaccatgcaggggtaggaggatgtttgctccagctttgcattaagaagggagatggattcctagtgatgccccagtgaggccaagttcgatcccctcctccctctgcttcccgtgtggtttcttcagcctgggctgccttgccctcacctcagccctcacgtaggtcatgtagcctacatccccgagggagaagtgagactattcttacagcataggaaagttgactacgggaatgacattaagagactgaactggaatcttttatctttgtctactcgtcttcctcctaacacaaatgcactagacttcttacacattcacaatcaggagaagtacatgcatgatatagtaaagccattaacctggtgtcaagtgttatcaattgggtcattaaataagactcattaagcatcgtctaactgcaagtagatggtgctgcaccttttggaactggatgtctagagccagaagcgtcagtgcagactactctttgtggtttcccttgtagctactagccggcttggaaggaatcacacctatgttagtccttttgggctcctgtaacagaataccataaactgggcagcatataaacaacagaaatgtatttgtcatggttctgcaggcggggacgtccaagatcaagacacttgcagattcagtgtctcgtgaggatcagcttcttgattcatagacggccaccttcttactgtgtcctcttctgcgggaaggggtgaggcagctccctggagcctcttttttaagggcactcaccctattcatgagggcttcaccctcatgacctgatcacctcgcaaggaccccacctcttgataccattaccctgggtattaggatttcaacatgaatttggcaagtaagagtgcacaaacgttcagaccatagcagtacttggccaggctacctcctaataatactgccaagcgaaatcagatggtgcaggcgtgatagagcggcacgaagctatttgtgtctttcataattagcatgttttgaaggaaaacttagctgtgatagagttagaaattagacttttctgctcagcaaattagctctcagattgcaaaccacgtgagtccattcccccacccccaccttactcccactttcagagatgaatcagatggtttactctgttctactttcctcttcagaaaagggaagcagaatccaaacctaattaagacagcgtttcagcgctataactaaattcattcatagcccaaccacactgggatgcatgagcttcctctggccacttcatattgcaaacctggttcaaataattatcattcatcatttactctcaagtttaagtttctagagaaatttttaaaaattaaccctgctcttctcatgcttgctggggccacaacgctccagtcactttgatcaagacagcacagaggcctcatactaaagcaagcctctgaacatgctccttattaattaacagctgcaggcatttggaatgttctgtccgaatggtgttaacagcctcatccctttggtggccagaactagaaagcagaaagatcccaagtgaagctcctcttttgagctacctgctagctcccaccactcacgcaggctttggactcacctgccctgtcactcacagctgtgtgacactggacattcagaacctctctgtgcctcattcgccccacctgtaacacgctgggtcacacaactccttcacacggtgatgattcctagagattcatgaatatttggagattcctactctgtgctaggcactgtgctgggcgatagggagacaaagagaaataagaccgaggttcttcccctcaataactccatgctccaaatcagtgcttctcattcaagggctccccccgccccccccgccaccccccactccccccaggggacatttgccaatagctggagataattttggttgtcatgatgggagatagagggtgctaccaggatctaacaggcaggtgcctgggatgctgctgaacatcctacaatgcccagaacagccccatgccaggaattactcactttgtcatgtcagtagtgctgaggttgaggaaccctgatctaacagaccaatccagatagatacgcagataatttcagtgcagtgtgataggagttacgagaattaaataaaatattttatgtacaggggccaagacttggtagttctcactgaaaggtcatgcccttcatgcagtgacctgcttctgcaaggacttatgttggtagcaaacagccagagaaagaaggcagtctttgcattcactacgcaagggaggtgtcactccaggtgacctaaacctggcttgtgtgatccagtcctgcctcttgcttccagctctgtcaaaatccctgcccgtctacaggttaccaggaccttgggggcagagggatcccagaatgagagctggacctgctgggggaggaggcaaccttcagcattgagtattcctttgcacttgcccttccctctcatctgaacactcccatccctcactcgagctctgctggggaaaatgatgaatgagtcacgaagtgaatcactggggaaagccctccccgggagctgtggctgagaacccacccaggcgacataacttcctggttcctttcttgcctctccccacaaaagattaaaaataaaacgggaaatagttaagatgacttgctgcagtaacttttatacttttataataagaaagtgaaaatgtttaaagaagccaaactggtaggctacccgaattaggtcgagcacgatgaagactctattctgttgcgttggcatcaggctcgttcagaaccgactgcttcaagcaagtcattctcccaaagaggcggaggcagggtggaaagaaaacgtgagcctaaattgaaatatccagggccttaagaaatcactcacgctctctgagcatctcgaagtttcctggctttcaaaatgggtttgatggcacctcgtaccattgtttggagggtagaggagttcaggcatgtgaagggacttcgaaagttaaacagccttgtacaattattgctaaatgttggggacaggataatagcattgtagctttgttttcatctttcaaaaacatgtcttgaaataattacggagggtcgggtgcggtggcttacgcctgtaatcgcagcactttgggaggccaaggtgggcagatcacctgaggttaggaactcgagaccagcctggcccacatggggaaaccccatctctactaataatacaaaaattagccaggtgggatgacgcatgcctgtaatcccagctactcaggaggctgaggcaggagaattgcttgaaccccaggaggtggaggttgcagtgacccaagatcaggccactacactccagtctgggtgacagagcaacactctagactttttttttttgagacagagttatggaggaaatgatattcgggatttgctttaacataaggatggaggagtggaagggggcagagatggaaccttgactgtgagttgatgatggttgtgactagtgagaggtatctgtgccttcattcttctagtctattctctctacttttaaatttgaatttccaccatttaaaaacatctgttagatattttaggtatactgaactatatacttaaaaatggttaagatggtaaattttatgttatggacattttatcacaattaaatatatatatacacatccctcttttaaagtcagtaattgagatcagcaatatatatgaggcacaaggaacacagaaaagcaatcatatgagagggaaaaagagaaagccaggattaaaggggcatagctcttttgcccccttttctgggaatttgttaagtacaaccactgaaagaagcaggactctccctggctggaggactagagagtgagcaggaactttggccaggacgttggaaataccctcctgggggcacgtgacctgagatggttgaggagcggttgggtgctgcatgcatgtgaggccggtgcctgccagggagcgtgaggatgaagacaggttgcccaagcctggagaggcccactgtctgcagggcaagcattcagagagcacaccagcacaccatcctcgcatttggctgcgagcaaggcaaatgaagacacaggacagtgtggagggctctgcatgctgggctgtagtttggacttggaaacagatgaaatgaaagctgtagtcacttccctttttgccttttaaaaaatatatgttcaggggaaaaaacacatgtcagaaatggagtcatttgaagctaagtgtcacccatctcggaataattgtccgccagcactagattttacaaagtgattggtggcacagagcactcttcctgatggacaacactggcccggcagtgtaggagggaacgcaggccactggcagagcagcagagtctggggtgggccgtggcctctcctctggccccagttcttcagtcgtgacacctggggatatgtcctttcatctcttgggctctctgcatccccaccttgaagggaggactggatggaatccaaagactgatcacaggcggctgtgtctgtgtttgcagttgttcctggcaggcagaccacactggatgtgtcttagtcgtaatctgggggcctgggcgtgatgagctcttgttccttctactgtgtaacttgcactagaacctaaggaggcctctcaaccagggtccttttttcagctgtcaccaagggtacaattaatggcacaaatcggttcttccctatgacgcactttgtgtgagatgcctggatagcaaaggcaacacttgcactgtgcgttttccctcctggattccaatagctttccagttagttcataggtttcaagggatttggatggtgcaaaatggaggccttttggaagaaattaaaaatgcgaagcctgataagcgtaaccaccattcttttttttgtttttttttttttttcctcactggctaatgcattgtgtgtttaaaaggagatttggcccaacccagcctcaagccattatttactcaacctttgttttctttttctttttctttttcttttttggtggttgttgttgtcggctcattataaccaactgaactcagcctttctttaacatttattttctgtgtctgtgctctggacttaagtgaatacaagatctgagagagatgacccaccaggggtagtggttttcaaattttggcaatgggcctgtttttctttaaacaaaagattggttttctgagactatgcaacaactttacgcaaaaactgtatttttgtccacaaatttggtgacttagaacaacacaagcttattatcttatggttctaaacaccataaatctgaaatcaagcagacctgtgctccctccagaagccaggggagaatccttccttgcctttccagcttctgatagatccaggcgttccttggtctgtgactgtgtaactcatgtctgtggctttactggcatcctctgctccccttctctcttttctgtgtgtctattataaggacacttggatttatgggcccactaaggtagcccaggatgatctcatctcaagatccttaacttaattacatctgcaaagaccctttttccaaataaggtctcattcacaggttccaggacatagacatattttttttgaggatcgtcattcaacccagtacaaaaaccttacacggggcagaagagagaaaggggagagctctgcttatatcattatcacattgtcaggaccttgacctccacacattcagatcccacccctttcccccatcctttgcccggtaagccatgcaccaaggatccaaatttgaaaaccagagttttagcagagagagcttgggagacttgggagtcaaaggcctacgctgggaaatgggcctggagtttccacaagaccacttggcctctcggtttcatcatctgtgaaaaatgagatattcaggtctacgctacagtgttgacatagagtctaaatgagatccttagttcttgggtcatttccagggctcggtagcatgagtttactctatcctcatcccacgacattctaccccgtggaaaaggtgttgagatgttatggaaacacttctgacttcacagaagggttggttcctgaaccagtggacaagaaagttaattctggctttcaaagaaagccaagagctctagaattgtagggttcaggttttcatcttttcctttggcagaaaagagagcattcttcaagcctattcaattctaagtaccaaatgacaagccatattaaacagatcccagtgagctccccacatcctttcctgcttacaccacaagtggactgtgtgccaagcaaggctttgagatcaattgcacttcggtggcttttgagtagtttctcaactccatctcatctagtgacattttagaacggataattatttgttgtggggactgccctgtgcattgcaggttcagtggcatttttggcctttactcaccagatgccagcagcaaccccagcccattgtgacaagcaaaactgtcttcagacatggctcagtgttccctggcgggcaaagttgccactggttaagaaccactgctttaagagaacctatgctcgaggtcaggcaccgtggctcacgcctgtaatcccagcactttgggaggccaaggcaggtggatcacctgaggtcaggactttgagaccaacctggccaacatggtgaaacccccgtctctactaaaagtacaaaaaattagctgggcatggtgtcaggcacctgtaatcccagctacttgggaggctgaggcaggagaattgcttgaaccgaggaggcagaggttgcagtgagccaagatcgtcccagtgtactccagcctgggcgacaagagtgaaactccttctgaaaaaataaagagaacctatcttctttcaagccagcctgtcatgtgtcagaactaaacagtcattttccttataattttttttaaaggcccagttgctgcctgcccattgctgatgcaggaagtctgagccattcagttaacaccaacccgaaagatgcagtcagaggctgactttgcttccctgctgtgcacaatttgtctcttccctctccttcatctgcaaacagaaccagaagtgatcttccagaagaataaagctcatattgtttgttccaattatgaggatcgtttctccagttctggtctcaggtgggccttaaggacctcaccaggtgatctgcccaggtgaacgtggtatgccctgaaggtctgctatttaccagtctgtcttgttaccttttttagaggagacattcctcagcaatacctggcctccattttccagcctgtgagttagaaccccgatgctcagatttctctagaggaacacactgcctgcaaggatgagttttccagaaaagccatcttccaggacagagacgcagagaaattaagcaactcatgttgattcagtctgggaatctcgagagagctgacaagcagggcggggggggtggccaggagctgacatggctttctggtaggcagccccacatcctgcttcctccctgtgctgagtgtaatcacttctgccccttcaggaaagtacttcacacccgtggcatagagccaacagtgaggtggattccgggtcctctggatgcctgggatggtgagatgcttgagaaagttttggcagtttgttcagacttggggactctccagtctgccttcctatcacccagcaggaatgcccttcccttcaaccctgatacctgggcacttggcctccacctgaatacccttggtggtgagcagctcactacccctctgaagacagccagtcccccgtgctccatgttccttgtcacctgctatcttatgactgcatcctgaatccgactctggcttctggagggaaacttggtgcttaagcttttattccccatgacagtgttccagccttgctgcctgctcattgtgttttctggggctaaacttctccagtcctttagttattacatggcacggcttctagatccttacttctcccaaaagcccctccaggaggtaatccagcatggtatggccccctctaaatgtcacattccagactgaccacactggcagctgactctatgagaatatgggggctgcccctttgtaaccctgactctgttaatgccacggaggttgcatgggcatttgggataagtgcatcactggtgggaactcatgctgaagctccattccgctgcagctcttcctgccttgatgagctcttgctccataccttcctcagcccatcctaaagtgcttgcaggcgaatgctggctccctttcagacagatagtttggccatgttgaatcctcagtctacctctagtgtatgaatcttccctctcaaatgggcataacatgccagtgtatccatcccacatgcagagaatgggataggagtgaccctttggcacactggccaagacctccatcctgctccacaggacttcacacatctgctccacggctttgagatggttccgccagttctgtgtctcagcatcatgcatggttccctctctcatatagtgagtgagtgtttttgtccagtctgtacttgcctcacagtataatgtgtttatgacttgtcttcaatctaatcagcatcctgttcctatcagaaaactgcagaggaaatgaagttggtctggcgtgacttgttcctgctaaactctgtcgacttctgacagtgacagctccctgcttgcagaacacataaatccagagtttaataatccatccttagttttcaccaggcttcaaaatcagccgactgtcatgtcagcaagcggccgtgtcccccttagtgataaaatcagggtgaaatttgcatttgactcacatcttgactgttttccaccgttcgtcaaacaaaacccatggtgtaggggccccgctggaggtgaggttggaaaggggtgagaatgcatcggttgcttgcagctggtgccaacctggctagcacctctgcagtctgcccttcccagtcagaacctcaggacaccaaccctgcctctagataggagggatttctgctgatgcagcctatgttctgctgcatgttcagtactttccccggatgcaggacgtagttttgatgttaggatttctgctttatcctggaaccccagctcccatccctatcttgtgccctatgcatgatcactgagtctctactcatttgctcctgcatggggcctgggcatgaatccacggatagacagtgccccagggacctgccgctagcccacccactctgcccccagagcctgattctcattctgctgagcctcactctggtgctcacgggcctccttggacactgtacaccagcaccgtacaccagccagggcaatccccaccagtcagcacacactcggagggaggccctgagccaggtccccacctgcactcagagccccatctgcctgtagtcgcacagcctggcatggagtcaggaagcctgtgagggtttaaaataggggatgagtgtgatttaatatgttttgggaagatgaaccgagtcaagtacggactgtatgagattggggagtgtattagtccattctcatgctgctaataaagacacacctacaactgcataatttataaagaaaagagatttaattcactcacagttcaggatggctgggaaagcatcaggaaacttacaatcatggcagaagaagaagcaatcacttccttcttcacatggtggcaggagagagaagtgctgaacaaaatggagaaaagccccgtataaacccatcagaactcgtgagaactccctatcgtgagaacagcatgagggtaaccacccccattattcagttacctcccatggggtccctcccacgacccgtgggaattatgggagctacaattcaagatgagatttgggtggggacacagcgaaaccatatcagggaggtccctgatatgggtccttctattaccctgtggttggggtaatagcaggcctcccttcccttcttgggcttttcggagatggtcatttttttgacagacacggcgtgaggaccttcactgattaccacagactcccacagagtcatttgccccgccgtgtcctcctacaggcgggggagccaccctcagaggagctggtgaccctcctaccttgaactgcactgcttcagccacaccagtgaggcaggcattccctggcatgagaaagcgtctggctccctctggtgacaagaggaagcacctgagcctttgccgccatttccactggtggtggagcacgaggtgaggatggataaactaaggtccagagatcccccacactgtaggtgcggggtggagtcccaagtagaggccccatgccactaaagctcagttctgtctccctcaggaccctgggcttcccagagccagcagggatatggctctgagcaggttcttcagcactctgcaggcgctggttcctttggaattaattagatttctctaaaattagcttagagttagagggatttccaaagccctcaaccttctgctgccatttcccctttctgagtgggaggaagtgcaggatcctgcaggacctgggctcctacgcagttgtgtggccacaggctggtaatctaacttttctgtgcctccatttcttcatttataaactgatggtgaagacacctgcctctcggggttgtgaggattacattctatgcagtgtctaaaggccctagcacatggcgggtatttaattaagaatgattttgttgttgccattattcatggcatcaacagagctggatctcgaggtagcagtgggctttccactgtggagcagcagaaaccgagttagttcgctatatccccattgagtgaacacctgagcatgctagtgaatgagagtgagaaataactgggaactacacaagttggcttttgggagcaccagagctggctagcacagggcctgacttgggtcttgcccttgaggcctgggctcatccccaaggttttccgagcctcagggacctccacagcagcactccatagcaggtgtctccctgaggccacatagcctgagcaggacacacctgagcccaggagctgccgtgcttcttgctgtaggcaggtcatagcctgacctcggcgcacctccgcgggcagctgcagcccagccatctcctacacagccacaccactgactcttcttgtttgcaagggtctccgtctactgtctgcctcacatcttggggctctcccacacctctgcctttgcccaggctgttcctgctttgcccaggctgttcctgccttcttcctgttcttcctcccctttctttagtcctctgctttgtttttatttcagcttcccacttactgtacatgtatcactgggcacgttacttcatctctctgtgtctcagtttccttacgttaaaatgggagtgtatctgcgcatagggttgtggcgacgattaaatgaggtagtacatggaatgtgctagaactcagccctcagctcactaggcatcagcaccgtcatcctcactagcaacagacctgcctcaaaacccagctctggccctacgctatgaatggggatatttccctcactgatgtcctgtgactcatctgccatactcgagcttgcgccctgtgagaaacagtttatcttgtgtaccacgtttaggaaacttatttccaagcctgccctttgctaggcacggtgagggggtccagcgataatgagtaaaatggtcccacaggtcagagctccctggcagttttccacccggccagtcctaaccagggagcaatgcccatgaaggtgctgattttatcctgacatctgggggccctgggatggctgcattcacgttggatggcccaccacatgcatctagtactccatgccactagggggcacaccacagcttccaagtaccctctcaagtgttggcccacatgatccccactctggtcttgggagctgtgttagtctcctggggctgccataacaacatgccatagactgggtggcttcaacaacagacactcattttcttacagttttggaggctggaagcctgagatggtagtgttggccatgggtctcttaagaactctctccttggccagcagacggccagcttctcactgtgccctcacacggtctgtcctctgtacctgagcttccttggtgtctctgggtccaaatccctaaggacacccatcagattagggcccatctaagggcctcattgtaatgtaataatctctttaaaagccctatctctgaacacaatcacgtgctgaggttcccgcggccagggcttcaacatggatttgaggggacacagtccagcccgtaatagggggagagcagggcaggtgactgccctgttttccagatggagctgctgaggctttgaggggtgagtgcctcgagcacagcctcctgctgttgctaagttgtcctgcagagctttgaagcctgaactagacacaaggtcctgcggtctctgcactgccccttgctgggggcttgggtgtggacagcagggagcctgcaaaacctgcatctgagaggatgtccctagagagcttctgggaggaccccactgggctcacacacagaatgcgggcccttcaggaaggcacaagctgttgtttctctggatggatttccggcctgcggctagccagccagagaggcatgtgccttcaccctggtaaggcctggctgggcctggagagaaagaaaagatgcctctttcagctaggttgagaagcccagagtggcaacagctgcggctttgaccaactgcagatcctccccgagcatcctgaagtcgtctagctttgtgggatatcgttatacaaattattctccatgaggccagggcttcctacccctcccaggcctgggtagtaatcagtttacagttcaacacacacggagtccctcctccagggctgtactgcccctatggaaaaggtgatttttgtgtttttttaaacagggtctctgcttttcccgagcctacaattattatggcaagcccaatacatggagtttttttttttttttcctccagtccaactagaagcagaactatagaaaaagtctcaggtcacgtactatgacagaagagagaaggtgaaggatgagagaaaatctaggaaggccccttggaggaggtggtatttaaggcaggctttgaatggaggatcagtttttgatgcaccgctagggccctggaggagaaggagaaactgggttgaagaccagcataagcaaggcccatgcccataccagacagcagtaggggccatactcggtgccccagaggccacacggggtacaccaggcagagttctgtgctgagtgctcacactcgtggcggcatacagtgctgctttggctggctttacgagagatttgggttctgtcaccatgctcagtgactttggtctggccacatttggtgaatggctgcccctccaccttccagggtgaatatcaaattgtgtccatattcttcctttagcccatgtgcccagatgcattttttttgggcgggggaaggtaggtatttttcatttttatggatacatagtagctgtgtgtgtgtgtgtgtgtgtgtgtgtgtgtgtgtgtgtgtgtgtgtgtatggggtacgtgagattttttgacacaggcctacaatgtgcaataatcacatcaaggtaaatggggtatccatcatcacctcaagcatttatcatttctttgtgttaccgacattccagtgatactctttcagttatttttaaatgtaaaataaattactgttgactgtagtcaccctgttgcaatatcagatactagagtttattcatcctgtctatatttttgcacccattaaccatccccacctcccctgcccccttcccagcctctggtaaccatcattctactctttacctcccaaatgcattttgggtaccagctatttctttggtcagtgctggtaccactagtggtgcttttttttttctttttctcctttttttgagacagagtctcgctctattgcccaggctggagcgcagtgttgtgatctcggctcactggtgcgatcttggctcactgcaacctccacctcacagattcaggcaattctccctgcttcagcctgcctagtagctgggattacaggtgcccaccaccatgcctggcttttatatttttagtagagataaggttttcaccatgttggccaggctggtcccgaactcctgacctcaggcgatctgcccacctcggcctcccaaagtcctgggattacaggtgtgagccactgcacccagcccactgatggtgctttttaatgagaaagtctggtcaagggcagcaagggcagaggctggttctagtccaggattctcaacctgtctgcaggtagaatcacctggggactttgggaaaagcccattgcctagtgtgtcttccagaccagcttcatcacaatctccaggagtgagacctagggattggtgttttctttttacaagtttctgaggtgaatccaatgtgcagcccagtttgagccccattgatgtatctgatctaagaggtcaacaggtgcagtaatgtggggaggggcacatatgctctggctctgtcatgtactgtgtggatttggtaacattagtgtttggttttgtttgtaaactttgtgatggagataattctattacacagtgtctaacacctaatttgtgctcaataaatggtcacctcctcaccgtctccttccctgttcacctcctcctcagacataagcaaggtcagttatgtaatgctggcaggctgttggcagcaggcaccagataaatgtgtattgcaggtttcctgctgtttatggatcatgttttattcatgcacatatgatgcagaatgctccctctgaggggagaactttgagcctgcagatttaagatgtggcaatacatttatataaattgaggagacgaaggcaagtgggtgatgagaaacgcaaagccctgacggagggtttcacaggcatttaggaagtggaggccaaggatgttcaagcagcctggaattgctctttttcctaggtcagcactgccctctagtggggcagagtcacagccaacccgcgtttcctcctcactcctcccacttgcgagaaccatctagggttaaaattactccaagtccagccaaagaaacagcctagggagaccagccatgcacgcccccattcttggactcattgttcctgaaacacaaagataattctagaaagcttctattcatgccagatatcagaagatttgcatgcattacatataattctcactgttctacaagactgataacccttcttcccagactcagagttgggaagtgaatcttccagaaattgagaaatgtaaccaggattccagcctggtaggaatcagccttggctgattctcacgccttcaccactgtgccgtgatacctgctctttctctaggaactaggtcccggagtcctgagttaaaatccacttccaccatgtacaagctgtgtgaccttggtgcagctgactgatctctctgcgcttctgtattctcatctacaaaaagagtctcataaactcaccttatcaaggcatagtgagaatgattgaccttgaataaatcagaaggggcagagaaagagctgaagaaaatgactgcctctggatggtaggaaaactgtgttttccccctgctgaatgcattacttttataatcagacgaaatgatcactttccttgtaaagaggtagaagccgtcacccgtgtgtaccagccctgcgagatattataggagagaccgttttcttgtttcctcgaagttgagtcaagcaaatctcaagattcctctaaagaaaacctcaggcttcccccaaagggatctctcattttgtcaagtacagaaccctcagctctgcccttctgctgcccagctagcttggtgctgtctctgtcactgctaagaagtcaggactgactgtcatgtgagatctcactgtcctcaggtgccctcccttcccacgttcaggaagggatctgagcagaggtttgagtgcagggcagcgtgactcctgggtacagtaggttctcccttcaccactctcccaaggacagctgagaagtgcctggtccttgcagttccgttctatcagcacctgaaattctattgcaatagataattgtattcttcagaagtatgttcttcagagaatcgtatttgtctctaagctttctgtcattaggagaactgtgttgggatttattaaaaattactcataagaaataagccttgtgcatagaaacagacgagaagggaagatctaaatgcatgtcagtgtttctgggtggtgagagatggtgatttgtgctgtcatctttgtaataatgattgctaaaatttattgagcacttactgtatgccaggcgctgtggaaagcccttgtgaggcactaatcacccaaacctcaaaacaatcctgcgaggtgggtactgttaacctcactcacaggtgagagtatggagggccagagtaggtaagtacctttgtcaaggtcacacagccagtgactgcagaccctggccatgcagctctagggtctgtgttcttggccactgtgttattctgcctctctacgcttggtttatcctcagtcatccttaatgagcatgtgctgcttttaaaatgaagaaaaggggttttgtttgtaaattaacttacatggttccaggaatgataaacgcatatgaagaaagacagtacaaatataataatgcctaaagggaaatatgagaacgatgctaatcctttacatgatcctgtattttccacattctctaaaaaaagcagagtttacctaagtgatttaaaacgtcataaaaaaagaaaatcctgctgttagaggcaccagtaagaagaacaaataacagctgatggtttttgagaatgtctgtgttccaggaattgatcagaagcattctgtgcactacgtatttgaccctcaataaccccttaggaggtagggattgttgtcatcccattttacagaggaggaaactgaggccgagggagcatttgtaccatgctcacagacacaccagtacagcagagccttgacaccgatcctccctcaaggtcagtagtacctctctgtccttttccaccccaggagaccttgagggtcagaaacacgaatgggtgcatctaattgcaaagtgagtaggggagctgatagcagtccctgggtttctggatggcctgtttggctttgctctcaggggcataaagagtttatgccagcaggtagcagatgcctgcagctcctcgggcagcctgtgctcctctcacccagccccacaggctgttcaacgcaggagccatgccccatgctacactttgacaaagagaaaaataaaggttcacatggaagggtcaacatttttctcaaacaatgcagcatgcaccaccatagccagccagtgatagtatctcttccaagagcaggccttccagtgagcctgcagaagccgcagggccaggcggaaggagggagaacaagaatgggtgccatggagtcttcctcttggagcatcagtggaaactgatgtttatgaagtgcttcatctgtgccagggctgggcccccaccattgctttcatttattactcaccacagccctataaaatgtcttagtagcacactacttttcagatgcagcaaaccagcatagagaggctgagggggctccccaggtttccaggcagttaagttggtagtacttggacgcacatccagtccagctgtagaacccactctgaatcccaccccacctgccctctgaagggcaactgggcttccctgctgtaagttttgatttcagagtagccgtgtgcctgcatctgaatggactcctcgattcaaggagctgcctttgaatagcaaagtttagttgtttttgttcttcaaccctgtctatttgcacgtgagctaactggggacccagttttgcgtaggcatattgtggttaagctgctgcctggaagccaagtgccccggggcgagctgcttaagtgggcctcatgccttcttggatgaaactgggatggtagcacccaacccattgcctagttgggagtaatcctgaggtaacattggtgaatcacatagtccaactggcgtcacacagcaggcactcaaatagccatttgtgtgtatgtacttatatcacgcatgtgcatacgtgtgtattaaaaatattaaaatcacgttttcttgcctgaaacgtagatacacagcttacacgttgttgtgaaataaatacccatgaagtctataaacaaatcaaccacaaaactagcattggagaatctcctccccacctgtccccaaggaccctcccttcccccgacagtaaccacagtcctgacttctgtaatagtcctttccctggtgttctttatagtttgactccctgtcattaaagagttaactttgctgtttggaatcctgcataagtagactcacaccaggacgtgttctttcaacttcaaccatgtcattgatgatcacctatagatgatctgttttctttgctgtagagtaactccagagtacgggagatcacagtatgtttttctgttctaccatggttgggcatttgggatagtttccagttgggaaatcttacaaacaatgctggtgtgcgcattcttggatgcttctccaagaatgtgcagtccgtcagcacacttgctgtggggtgtttaccaaggactcagaattgtgcatcattggattagtttatcttcactttttcagacactgccaagttttgccaaggtgttgtccaatttacactcctaccagcagtgtaggagagcttcagatccttgccaacacttggtagtgtcagactctttaaccagctgaaacacactcgtatttaattggggtctaaatttataattctctgaattctaatgagactgaccattttcttatatcttattgttcatttggatttcctgttttttgaaatgcctattaaggtttctgtcgatttttctcctggtttttttctttctcatcaatttatagtagtttttatatagtctacatatgaactccttgattcttacatgtattataaaaatatatgtgttgcacatgtattttcccacattttcacattcttggtcaactcttctgataaatcagcttcactctgataatgaagttgttaattgtaatgtagtccagtcttttctttcaatagctagtgttttttaagtttgttttaagaaatctttcagccgggcgcagtggctcatgcctgtaatcctagcactttgggaggccaaggtgggtggatcacctgaggtcaaaagttcaggaccagcctggtcaacatggtgaaaccccgtctctactaaaaatacaaaaattagccaggcatggtgccacacgcctgtaatcccagctactcaagaggctgaggcaggagaatcacttgaacctggtgtggggacggcagaggttccagtgagctgagatcaagtcacttcactctaaccggggtgaaaaagcaaaactccgtctcaaaaaaaaaaaaaagcaatatttctctacccccaacatcatgaaggtactttactctgtcattttctagaagcttttatgttttccttttcacccttatagtctctggtctctgatccacctggaattgatttttgcacgtgttgtgaggtgaggctcattcccccaccacccccctccctccgcccaccgcctatagttgcaaattgtcctggcaccatttatggaaaataccattctttccccaactgttttgcagtgcacactttgtcataaagcaggtgtctgtaagggtgtggatctgttgttgggcttctcttttgcttcattgctatatttgttatttcttgtgccagaggcaccttggctttaaaagaagtcctgatacccaacagggaaagtcttgacaacagttgtgcttcttcaaacatgtctagactggtcttggtccttagcatttctatgaacaatttagaatcaccttgctacattccacaaacacaaaatgttgcctagtacttttattatctattattttttttttttttttttgagctggagtttcgcttttgttgctcaggctggagtgcaatggcgctatcttggctcacctcaacctctgcctcccaggttcaagcaattctcctgcctcggcctcctgagtgcctgggattacaggcatgtaccaccatgcccagctaattttgtatttttagtagagtcggggttgtctccatgttggtcaggctggccttgaactcccaacctcaggtgatctgcctgcctcggcctcccaaagtgctgggattagaggtgtgagccaccacgcccagccccatctattattatcttatatcagtaatagtattaaagttgaataattcttcctggaccagaaaatttcaagtttccagttgtattttccaaattcttctggttacatgcacctagcctgacccttcttgtagacttagtgagtcccatggtcggattgcatctagaaggaggtacatcgagtgggagagtccacagcacagacagagacatctgcagagggacttggggaaagagcactggtcagggaaagaggaggtttgggtctgggtcccagctctgccaccaactggccaggtgagcctgggcaagcaattgccaagaagagtcactcactccttcttctgcatggccactgtgactagtgctctcaaccacacatcctttcaacaaacagcgaacttactgtccatcagcactggggcgaaataggaatataaagaagaataaagcatcatctctgcctgaggggcttagcatctacaacagtgtctcttggactgtgctgcagtcaacaccaggactgagaaatgacacacacaaaaaaatgttttgtggtcaaataattaacacaaaacctttgtgcaatattccattcatgcatattagcatttatgagatctgagaagtcttggagtttaacccagatttgcttaacgattgtattagttttctatcactactgtaacaaattattgcaaacttagtgtaaaacacaaatttgttatcttacgcttctggaggtcagacatccatattgggtcctactgggctacaatcaaggtgctggcagggctgtgatcctgcgtggaggagaaaatctgttttgttgccttctccagcttctataggctgcccacaagctttggctcatggccatccaccatcttcaaagccagcatgactagtcagctctttctcatgatgccatctctctggctctgccatcacatccccatttctgactcggactccctcttcacatttaaaagatccttgtgataagattgtgcctatggggactctgcagtataatctcttagtctacaatcttaattcctcttggtcgcttaaggtaacatagttgccttaagggattgggatgtggaggtttttgggggccactgttcttcctgccacggtagtggaacccctgtgagtccacttaccccagctttatttatttatttattttttatttatttatttatttatttatttattttgagatggagtctgtctctgtcgcccaggctggagtgcagtggcgtgatctcggctcactacaagctccgcctcctgggttcacgccattctcctgcctcagcctcctgagtagctgttgactacaggcacctgccactacgcccggctaattttttgtatttttagtagagacagggtttcaccgtgttagccaggatgaacttgatctcctgacctcgtgatccgcttgcctcagcctcccagagctctgggattacgggcgtgagccaccacgcccagccaccccagctttattaaagtacatctgacactgcgtggcacatggtgtggaggactcggtgcagggtggggtcttcctgtagcccctcaccatcatgtactctcatcttggtactgctcctgatatcatgtgatagatttgtgtttgttgccattcttcaaactccacaagggtgaggttttcatctgttttgttcactgctatgtcccatagtgttcactgttgctgacatagtcctagcaagtaggaggttctcagtgggtatttgttgaccgagagtggtggaaagtctttctaataagacaggaagcttcttgagggcaaaattcttgtccaagttatcttttcttccccagggtccagaggtggctggtgctgaatttaaagattatatagtgcgggaaaaggcagactcaccaccaggaagtcttgctggaggtcgttttcttaaggaatttgccgtagtgtatacctagactaatctgtcatgggcagaaactcttcatcatctgggtataagttgagataataagcttctcaggcaaatttgcaacagagggtcccaaacttacttggttcacagcgtcctgagtccaaaagaaatacgtagtagttttgtttatcaagcagttaggctcatactgcttagtaagtgttgctatcctcacaacatagagtagctgctcgaaaaccatgatacgtatcaacagaaaatatatatatattttagtcataatcgcttactaatgggatgtgtgtccctgttggcaactgcacagtttctgaaaccttggaatcagattggacattgccaccctcattttctgtgcatattgatttccacacttggttttctcacagcaactatggaaaactcagctcacaaagatgtaatgtcactgaaagaaatccagtgttgacaccataggctaccttgggatagtagattcacatgtccaagagatgtcaggtattgctgtgtttcccttagaaactcaagatattctgccttacccctgtgagttcactgcagtacccaatggtgtcccagcacagtctgtaaactgaagatttgtgctaattcactgaaggcctgtgtacagaatgccagagccagatcaccatgcaggggagcactgcattcaaacccttgtccccttgtccagccatctcatccctgggaggtcgggctggcaacccagtgtgccaatgtgcttggcttggcaagcagcagatcagtggggtggactccggacatccagtcagtctggatgctgatgaggcttgagattacagctgtttcccagcaagaactccttcctgggcctggcctgctcccagctccagcccctctcccccaaagatagctttaagaaatgaggtatggagggtgtagtgagctttggaaagagaaggactgggaacccaggtgggtgccagccctcgttgtaggagagtcacaggtgtcatctatttaacaaacccttccctgggtctttctgtatgccagacacttttctaagaggtttgcaaataggaggtcattcaatcctcaccacaaccccatgaagtcgatctgttgttacccccactttacagaagaagaagctgaggcatgggaggttaaatgtactttgcccaaaggttcatggagctgggaagtggtagagctgggatttgaacccaggctgttcatactctcacctggacttttcccttagggggttagaaaacctgggcaatccttcccactgtgctgctttctagcaacgtgctggggccaggtgctgaaccactctaagattctgtttttccgctgtgaaacaggcccagtaaacttccccctggggtcattgaatggcttccaggagatcaggcatgtaaagtgctttcaattatccagggtagtagcaaagaaagccttcagacctccctgactagggaatcccaggctctcctccccaccgacatacatgaacctggaagacagcagggggcagcaccgggccgctgcagaaggttctgcacctggaggcgctggcccttccttccacagggatcctgcatctcagtacctggcaatctgctcctcctccattcaggcagaacattcgagctggctttgccaaaacaagaacaaaatcacagcctggcaggatgaattaagggggaaaccaaggaagaaagctcagcataaccgttgttagctcagaacctgccttgcacatctgggccttctgaagctgctcgtttcagttgttaagatatttctgaaggcacttcccgatgcacgaaggcccctcccacgtcccaccaccggactgtcctttgaaaaaggttcgagaacgcgttgcaggtggtggtttaccttgaggtccgtgtgacgaggagcgacatagaaaagtgaccagaggttgcacctgaggaggaagatgccttttataccaaaatacgtgtgcacaatgtctttggtgtttggcgtggggtcctatcaactccgtcctgttcctttttagcttatctttgttcagctgaaacccagatgagaacaggaccttgaaaaagccacaatccaaactctggaaacccacaccttctcatagaggaatttgatggagaggctgcctcagggtgtggtgtctccacagcaggccactgctgttccctgttcaagccaccatccccagtcactggcccatctgggccctgtggggctcctgtggacagctgaggccagcagcttgagggacgcccctccttttctgcaagagggcaggaggcctgggaccccaattgtgctatgatgtctggctagtcctcactttcaactgtactgtccccaagcatgggggtaacagcacagtctcgatgcaaccccttcagcttgttggttgtttctgtttttccaaggatgctgaaggcttggtcctttgacccattaagtattaataataattctcattattcagtctgtagggcatggatcagtgacgaatacattgcttgggggatttatttaagggaagaagggctatgattatgggtgatgggggaggtgccgggagtcacagcagatgagtcaagaagggtaggcacagcacccatggcaagagaattgtatccctgtgctctgtgtcccgttcttttgggaaggcctgagcagtgagtttgtttgctgagccgtctctagagtgccagtaactctgactgctggcttaccacagcctgcagcctggatgggaggatatgactggcttcaggactttgcaggaatctctctggtctagtgtgggtgccgcttctgactcggacaactgttctccatgccctctacttcctgctgctttctcagatcctcttcctgctgctctgctccctaaccacaaccccactaaatagagccccctaattctagcccattccgaaagatcttttccagtaacatcccctgcccccaactttgtgtgcttggttatcttaaagttatgacaaaccagagataatgtgctgatcatgtgaacgtcactcctctccaaagtgacacattttcattttctaaaatgcagcttattaacagaaataagattctacagtttctggttggccatggagtgactatttggaaacagtggaacttccagatttcttcgcatccaagtaggattttgctgagggtggactcagccctgtttctgtgatataaaacattttcttcattctttccttcatcagacatctcctataagccccgttcaaatgactgcttcagggttctgggttcccgtgtgtaaatgtgtgttagttcattcttgccttgctataaagaaatacctgaggctgggtaatttacaaagaaaggagattcgagtggctcggggttttgcagacagtaccggaagcatggtgttggcatctgctcctggtgaaggtctccagaagcttccaatcatggcaggaggcaaagggggagcaggcacattacgtggcgagagccagagcaagagggagaaggggaggtcccagattcctttaaacaatcagatcttgtgtgaactgagtgagagcacacccatcaccaagggggcggtgctgagccattcataaggggtctgcccccatgatctaatacctcccactaggccccacctccaatattatggattacacttcaacatgagatttggaggggacaaacatgcaaactatattacgcggcttcctttgcccggtatttaaaaaccatttgccttcctctgtgtagtttaagttgtttttccccacctcaagtcaatgaatgagttcggaggagggaaagcttcaagtcagcgaggctaggatttttactggttggttcaatgctgaatccccaaccctgagaatagtacttggcacatagaaggagctcagtaaaacttgactgaatggatgaatatgtgattggttccacaatgacatcaccgagagaatttagggtgagttggtctacgcctatgaacagactaggctggagagctaccctccactgggcttaggttcccagcaagtgacattcatctctcaccctgctctccaggtgcccgtgtggcctgttagcacccaaccttggagctgcctggcctggaattacccatgcactgactgtcctcatcagatggccagcttctaaagggaagggccactttctggactcttatttttgcctccagggcctggagaactgtcagtgctcaagaaatgtctaccaaattgaaatttaaatagatacagcctgtgggtttgaatttgggatcagtacttttcccagaatgtcctaaaatttctgtgtaaaataccaggtattgtatcgatcagatacttaagcactgcccagagcctgccattttctcaagtgctacagaatcacttaattcctgaacagctgttacaagcagccacaacaacagtggaaacagataatgacttcaaaacgtggacagaaattgaagaattgaaattaataaatgtgtaattaaatgttagatatttaccatcgtgtgaactttgttatttgctgaatttcggagtcttgaacgttttattatatttgaaaataatttgtggcatagattatcctcacttcacaaaaaattcttgagtttgcacagtgggtgtcaagggatcttagccaaccataaattaaataagttacataaaagtaagtaaatgtaaaagcaaaattataaaagccttttcaaaagtgtggatggcagaaaaaatatttaatgatagatgcggatgtattttaatatgtttgatgtggggtgaagtcctctaaaagtaagggacacaaatttcaaagcaacctacctgaaatactatagaattgtagcataatatacagtgctttcatagagtttccaaaaattagaaattcagcctttcccctctaggatttttagatgaattcctaatgtcatctcatctcatcaatgtaaaataatctccttgacctttggtgattttgctcatcgaatagcttctgttttgtaatctatttttttcttcatcttccttcaggaatcctgttcacgatgctggtatttggaccagcctgcgggtttatcctgggctctttctgtaccaaaatctacgtggatgcggtcttcattgacacaagtaaggaatatatctccatgtctaccttccatccgcaagcgtttcctccctcataaatgcggcttcagcctgtgggttctaaaaccttcttgctaagagacagtcttgatgcccctgcctctgtagctggggctcacccgagattagatgaaagaacgtgagtgttggttcagagggcctgactcaagtctgggttctgccaacatctacctagaggctgaataacccccaatagctgattttactcctcaaatctgtattttccttatctgtaaataaagggtaacaataattacatcggcctggcagataagaatttaatgagagtgtctgtgtagaaatgcttggcatatcctcattgagtgggggcccattaacctatatgaggatcctactttccaaactaaaagttggagcatgtgttctggaggtgcaagtgtacgaacggggtcaatgagacagaatattggaacatccttttagaagacactgttgtggtggcctttgtgaggaaatatccacattcaaaaccattttaagcagaacctgtgttcttagcaggaagtgcaagtgcatttctcagaataccctgagttccccaatccatgattgtgggattgaatgggatgctagatcgatgggctagactattctgtggtgacagacagtcccaaaacctcagtgattttatacaactaaggtttatttcttggtcacactacatatgcagtgtaggtcagcagtgtcagggtcagggagacttggctcatcgtggtgacctgtagatctactctcaggatcgataagcattctcagccccccaggcccaggcccacagaagttccatcctgaccccagcttgcacagttaccaagacaggaaaccagttttactctggcccttgaaacctctactcagaaatgacatacagtgtttcccctcatatttcattaaccaaagcaagtcacgtggtgtattggtttcctgttgctgcataagaaataaccccaaacctaatgacctaaaacagcagacatttcttatcatactgtttttcgtatttttttctgtgggtctggaatacaggagcagcttcactgggcagttctagctcagggtctcttatgaggctgcagtcaaggtgttgcaaggtggcaacctggtcttggatcatcccaaggctcagcttggggaggatccacttccaagctcactgccatgggcccacaggaggggactacctcaccgtgacacccctgaagcaaacaacccaagagaaggtgagagagagcacctgaggcaggagtcacagtctttttataacctaatctcagaagtgacatctcattacttctgctgtatttcgtttgttagaagctagtcacttgttcaggtttactatggaaagagaagggattattacacaaggaccagaataccaggcagcagggactttaggggaccgtctgggtcattgcctaccatgtgctgtcacatctctaccttgtgtctgaaaaggaacactatatttccatgtagtttagcatgcagcaaagccatatttcctttctctctgaaaacagagggtgagaagccattccagcctctgcttctcatgccgatctatcctcaggatcagtaagaattctcagtccccaggttctcaatccatcatctcttgacaatgctaaatttactaattcaccccaaagaaataatgtggttttaaatccaagtcgctttgtgattcactccattaatcctactgatatatttacttgtagctaatgatgttacaaatttccaagtggaaaaaaaaaatcagaggcagccctatttatttatacttttaaagtgctgagtctgttccgaaggtgattgagtgctggtgttttgcagccgtcggctggccctttgaacccgtttcctagggagtgtggtaacaggtaggctgggaagacacaggacacatgaagtgagtcagtttccatcttgctcgtatagacaggccagcttccaccactgcacccaaggcagcacaagacagggccagcagaggggatagagaggaggcatactcctgatgcaatggggaagccaccttgaagggtagcaaagtggccagatagcatattttgccctcagtgctatcagtggtggccttgaaccaaaagcctgcgaatgaccagaatatctgagctggaaagagcctcagacatcattcctttccaactctttcattttacaaatgaggaaaccgagtcacagagaggggaagggatgtccccaatccaaggaatgtatctctataaaaccccgatctcctgagcctgcctgtggagatttcactcaccaaactctcttaggagaatgaaacggcaccttttctcagtgcctgaaatgaccagcgggtagacagatggctggagggggcttagcccatccactcccagttccctccatttgctgagactgttccttcagcctggaatgctcttcccatcttactgtgttcggcatctctgtttgcccgttaaggcccagggtggagcggtgtgatccatggttccaggctcattggctacttggtgcctgcatggatgtaaggcaggtgggctcctttcagtcccgtgtgggcatctcgctgatgacaggcttccccaccaagttgatagcggacttccctttctgtttccaaagaatgcaaggtgcattgtcagtcacggtctttgtttgcgtccttcccggaggcaccgtgaggcaccgtgtggcacagctctttaccggtagagggcagaagaatatcatttatcctatttagggagtcagccatagaattctatagttgccagcagtttttattgtttctagtcttgtgaaacttgccgcctgcaggtggatttgggctgtatttgaggaggggattcttaattgctttagggcctcccctatcttttccttgctttcctaaaacagtgctcttctgtagggctgtccaatgtatgggaacattactgtaggcattaataggcaagggccacacacgtggacacatgtttctgaagtccccactgagattggggtccaggaaaagcagcagcctaaaatttgtggggaaggagcaaggcaggtccacagagggccctcgttatggggtagatggaggagagaaggcggcgtccaccacatagcctggtgccagcattgagaggagaatccagtgaggaagcctggttgaaacttgtgagtagatgcagctggggtgccaaggagggctggttgtagacatgggccagttctggggtgacagcccccacggggcaccttgcctggaggtcccagctggctccacttggacatgggctgctcccgctgctgcctttcatccatgtttgatcgctacgtggttccctttgctcctcagctcagggagaataaatccctcccctgagagctgggggaggaaatgatggtgcctccagaatttcttttttaggttctttgttaactgaaacccaggtgagaacaggaccttgaaaaaacggacttagtagcagagtacatatctaatcactgccttggccaaccttaactatgtgggtttattacaaaaagattagtagtaacagcagccatgaattggtcacttcttaaagctatacatagattgcctcattggagcctcagcacattctcatgggagtgtagatcctactgttaggtgaggcattatcatgcagtggttaagaattcaagcactggaatcagactccatttgaatcctgactacacccccttatgagttctgtgatcctggggacatcgcacacacatcctgagtctgtgtgtggatggcatgagttactcatgcaaagcatttagcacagtgcctggcatatagtaagcacacaataaatacttataataagaaatccgagagaggttaacagtttccacagctagggatagagcagggattcatccccaggcctgtctgacctcaaagccccactcttaacagaacagctggcttccctgaaacatctccaggaatttagccagaaggcggctcccttccatggacaaaggccttgctgagatggcctagcctcaccagcacatccatgcagacttgtcctgaggcacacaccagccggcctcgcagaaggctgcatggcgtttgcagctggaacaagatgtggccatctgtttgcttcacaaaaaaggtcaacagactgagagcctcctgctctgccatcctgagggctggctgctactgctagattccttcattttgggctaattagcccaatggctgcgattctagatgttcaatgccaccctccagccttagtcccttcctgtctccagtttctaattaggtttgtaacttaatgatactcttggaattcttgagtcccatagcaaaagtttggcaacataggttaaacaaatgggtaaatgaactacaaaaaaaaaaagtccatatggcacaggaaaaagaagtaaatgtccccaacttgctttgatctcctcttctcacaatctcaagtatcctcatgagcgtgtgggtgggttggttggttagttttaaactggtttaactgtatttccagtgacttttcatttgatcttggaaatgggtggaaatctccatgagcctcctagttcagttaacctttgacagagagagcaaacagctgtcaacagctctcaattcacccaacacaagcaacaaataagaacaacccagaagtcagatacaaagagtggaagggttagaaaaattgatcttgtaaggccaggcatagtggctctcacctgtaatcccagcattttgggaggccgaggcaggtggatcacctgaggtcaggagtttgagatcagaccagccaatatggtgaaaccctgtctctactaaaaatacaaaaaaaaattagccgggcgtgttggtaggcacctgtaatctcagctacttgggaggctgacgcaggagaattgcttgaacccaggaggtggaggttgcagtgagctgagatctcaccactgcactacagcctgggcaatagagtgaaactccatctcaaaaaaaaaaacaaaaaacaaaaaaacggaaaatggatctagaaaaggagaaacaccttctatgcctgttgacacctatgtcaagacaagtccaagctgtgcctggcttcatgacagatatttcatggtacacccagtgtatggctctttgctctactctgcaacccttttctcctgtcccctttaccagacttccctccgaatgaaatggcatctgttctcatcatctggaatgaccacggggtagattagtggcttgatgagggagttgagcctatttacttagagtccccagaatgtgccacaccttgactcagcctgttccctcagcctgggatactgtctctacctcattttattcaacatctttcttcatccatgtgtctagttttgttggcaattgaatgcatctaagtaaatgagacagattggtgctttcagttttgttctgggcatcttactgaaagcagcccttgccagaaggctgaaactgcagccattttttttaaagttaagacactaactagaaccaaatagagaagtaaagaggttttcaagccttcctccctacttttatctaaaacaatacttttgctatgccaagcctgcctgagactgctgttcttatagaacgtggatttctatttcctaaaccttttgtactagtcagggtaggctaggttatgttgcggtaacaaacagctcccaactctcagcagcttagaatactaaagggttctttcttctttgtgctacatccagtgtaggtcaacagggacatttcatttattgtagcctgtcagataccatcttaggaggaaagagggggtggagtcatgtaccagctcatacacacttccacacagaagtgatatatgtccccttgctcacatttcacaggcagagctctgtggcttgtagttacacctaacttcacagagtgaggaggtgtcatcctccttgtcctcagaggaagaggatccaatgcagacactgataacatctaccacaccgtcctcttccagccacacagagaactctccctcaatatccctagttctgaaacagtgtctgtagagcattgacggacaattaccaacaggtggagggagatttttcaccaaaactagccaaaatacctcataaaaattatatttgttagctgggcacagtggttcacacctgtaatctcagcactttgggaggccaacgcgggtggatcacctgaggtcaggagttcaagaccagcctggccaacatggtgaaaccccatctctaccaaaagtacaaaaattagccgggcatggtggtgggcacctgtaatctcagctacttgagaggctaaggcaggagaatcgcttgaacccaggaggtggaggttgcagtaagccaagatcacaccactgcactccagcctggccgacagagcgagatccacctcaaaagaaaaaaaaaaattagtatttgttatagagatggacagaggcaagacatttctcagacgggtccaaccagtagccgtcttccccagatcaaactcaccaaagcctcccccgccctcagggcagcacactccacagctgagcagtttctctcagcatgttatttctctctgccacagtgctccggataattgaaatggagaaaaaaatcaatacttcccaaaatagtcagtgatgagtgtcttggatctacagaatcctgctgtccaccaccttcacgcaggccccgtctcctgtacttgcccgggtggcaggcgggctttggttctgacacaggtgacgtgcccttccccatctttcaaactgtgagccagcgtcagctttccccagacatacacatacctacaggaagcaagttgacacgttcacacaaaccaccacctcccccatcgccatccctctccctgggttgttttctcacacttagaacaacagagtcactaacttcctaactaaaatatgacttttctaattttgttcccccaaacaactgctaggatttctctctctttacccgctcacatctgccagcttttcaattccccctttatggagcctggagacaatggaggaaaatacttcagctcccttttgctgtcttttgttttcattcattgcttggcagcaggtgaagaaacacagtaagtgactagtgaaaatattcctgttcagctaccagaggcaatttcacttccttgtgtcttccctcatttgcataaagatgctttcaagatcaccttgtgttttcccatgctgtacccttttttaaaaagatccctattttgagattctcatttatatacatatatgtacataaaagtgagaataacaagatctctctctatacaaagagcctactgtgcatcaggtgattcttgctcattgcctgtcatccttgcaaccactctaggttgaagctgtctttattttgcaaatgatgcagctaagactcaaggagggtaagtaatctgcccagtgtcacatgctagtaagtggcagagctgggattcggccccaagtactccaggcttacactgtcccctctccagcatgtagctatgcagaaacatctggtccattgtagtgctattgttgcgctgggtgtatgtcagcatctccaggacagtgactaccagtgttccaaaggccacttgctacctactggaagagctggtggccttaggctcatggcacaaagagcaggaattgatcattcacctcgggccctacagagagcccaaaaacagacattgaagaggggcagtggaacagaaaggtgagagcgtggaccttggcatgtgtatacctgtgttccgttcttcagccccatgaacctgggcaacgaacctaacctttctaagcctcagttactccatctatagaaaacagataataaaagtcctgccttgtagagttatggggaaggttggctggaacagttaagaatgtgctctgcataatgcctggtgcagaggaagccctcaataaacgatggctggccttatcattaatgctagctgaggagtcttcagggagaacattttatgagtgctgaagtgttcatctggtgtgtgcggtcattactcttcccagagctgtccatccatctggtccaggcctgcagccctgttggtcttacctcatacaccattgcccagatctccccagttctccttccatgttccaggggcatggtttattatcaaagagacatttctaagcagctcacctgggagctgtgctgtacaaggcaggtgtaaagagagagaaagaaaaaaactgtaccaaagggtaagctgaagtttatgttcttgtgacttagctggcacaataaaagaaatagtggtacagtgccaccaaaccatatgcatagcccctttaagcacatgagttgactgcaaagctttgtattagagagctggtgccaaaccacaggccaccaacaaagttggcattaattaattaattaatgcatggaaacaaaggcccctcaccataaataacaggctaccatcatctgggtgcccaagcatgcgccaggcactcttctgagcattttatgtctggtgtggtcatttgatcttcccactaagtactgccatcatcctagatgttatacagatcagtaaactgaggcatagagagttcaaaccactggcctagggtcacacagagacaaaggggtaggacttcaacccaggcagcctggcttcagaggccctgctctaaaaccctattgtgcgcctccccttatgagctgtgaacctaaattgaggcagtgagtggggcattgagtgggatctcgtgtgagctgctttttggaagccaagagtgaatatacccggtgaaaatctacctctgaacaataaacatttccttgtgcttctttcagcacaccttagcagtgctgccaagccagttttagcctaaattcagagaacgtctggcttctcactgtttttgtttagaccgatataaacacagggtagacaagaaaattaaggagggaatgtgatcagcctccggctttgagagaaacagaaccgctggtgtggaacaataggcttcgtagcctggcagccagtgttcccgaccgcaagtcatttctagagcccttgccctctctgttcagcggattcagattctcagcaaaatccccagtggtccagccttcttttctccactaagctgtgctctttccatttacaggtaacctggacatcactccggacgacccccgctggatcggagcctggtggggtggctttctgctctgcggtgccttactcttcttctcttccctcttgatgtttgggtttccacagtccctgcccccgcactcagaccccgccatggaaagcgagcaggccatgctctccgaaagagaatacgagagacccaagcccagcaacggggtcctgaggcaccccctggagccagacagcagtgcctcctgtttccagcagctgagaggtaaaggtggcctcatctgcctctgctcagaacagtagggggattgggatgggggtgatgagtgaaggggtggcacccaggactggggtgcttggggacttggtggaggcagaataatattggcttgcatggctggcctctaccagccaggtgcttaacttattcctgagaagtaaataacctgacttgcttaataaaaacaaaaataaagtagctaccatttgttaaagggacccagtggttaatataggacctgacatttaataaacataaatgtcttcagaaggaagcaaaatattctgtggagcttttttgaattctttcaggccacccataagcacctggaagcaataaaggaattttgaagttggcttcctttgcctgatatcagcattctttaaaaagccacctccagccgggcgcggtggctgtaatcccagccaccgcgcccggtgtaatcacatctgtaatcccagccctttgggaagccaaggcaggtggatcacttgaggtcagaagtttgagaccagcctggccaacgtggtgaaaccccatatctgctaaaatacaaaaattagccgggcttggtggcatgtgcctgtaatcccagctactcgggaggctgaggcaggagaatcgcttgatcctgggttcaagctcaccagaggttgcagtgagccaagattgagccactgcactccagcctgggtgacacagcaagactctcatctcaaaagaaaaaaaagccaccttcaaagtacatttctttacattcactttgtcctttcattgtctccactaaagatgagagatgttttcctgcagaaagaaatattaacccagtcttaatgacacagtcacactttaggatgcagcaaagctcttgctatcattttttaaagaaaaaaaagtgcaacttttctgacaaaatggtgaagcacaaacaatgatgcagagtgagaacccccctccaccaccaccgcccaagttgtttccatcttcggcacaatcctttaaagacgaggaaaatgacaaggagctgaatgtagcctggcagtctcagaagctgctcggcgactatcaggcgaggtatgtgtgaggttccttaatgcacacgactccttgctcagctcccctgacgtcctgctggattttagaaatgagtgggctcatgcagccaggagcaaggtcaggcactacttcccagggaagctgggatgcagaagggagatggtcagtcccctctgtgcaggaatgcggcactcagccgggccagccttccacagcggcagatgcagtcctcctgtgctttatttagacatttcctagcagtgaaagtctgtttactaaacttctgtgtaacaatgtgcgccttctatagagatgctagagatttgtggagagaagcttgaactgctttgtgctcagccccctgttctgttcctcaccagccctgcgatcattaactgccccctgcttcttttccacgaatgtaaaactgtaataacacagttcctcactgccagtgctgtctcaagaatgaaagcactgctgcagaagactgtctgttaatcgtacctgttagtccatgagaaatctcaagaacttgtgcgatttctgaaaagagacaaatttaatatcgtaatgttatgtctggccccatgttccatgatggtttctaccaatgctgtaatttggaatcatccataaaacttaagttccagaatgcaccggtagatgagaaggccagccaatctgtgtcctctaaggttgccttggttggaatgcccccgtcctcatgcacgtgtgcttaataaaataggctcacttccagcaggccccaggcaaggagggtgcctgcgactcccctagtagcaggagagtgatgcctgagactcccctaatagccatccatagaaagtgtcctggtaactagacccctaggaataaattgggcaggcatgagagtgtggctttcaaaggacatcctggccatgggcgactacagtattttcaggttgctccccacctcgggatgatgaccctgtttccctagggctctgattgtaaaagctgcactagtaatcacttgtctttcatctctgggaataaaaagattaaaaagatacaatggtgccatcagagaactcaccatcccacacaggaccaggtctgcaagtcagcaaaggcagcccagtgttttgagaaccgcaataacaagcagcacaggtggttacagaaatgcagcaaagaggcagagagaagcccaccgctcctgggctgggagtcacgggtgaggaaagggtcagcggcagagctgagccaagtcttgagccctgctatggcttaagcattcttgggtcatgattcagtcgctcattaactcatttgttttattccattggtagttactgagaccctactcggtgctaagcacagccttgactaaattgacttatattctggagcttatgttccactagggtgcaacaggcaagctcagagcaatgacaaggtaagcaagcactggatgagctgccgttgagctgacaagtacacagtcaggtagacaagtctgggacccgcgaggccatattgattacaaattgtgatctgtatacgcacaggcttcacttctgatggttaatgattttaatttagaattaacaattcccagaggcaattggcccataatggactaaaaggatgtctcaacaggaaaagaagaaagtgtttctgcaagattccttaagagccaaaatacagtgaaatgagctattatgctaataaacacattttacacatgccagtgcatgaagtggggccacagtcgtttacatgatttatttctccatgcgagacacatgtttttgctatacgagcttttccaccaaaagcaccatgcagtgcaccctggcattccaaaacccttcatccagtttgcatcctggaaaacccacgctgcaaatgcagtgctatatacatgcagtgtgttacacatttgtgggtttcaataagctgaacggcgttgcatgtatacatagaactgacattgctcctaaaaccccatgttgcaatttctcatccgttttgtctgagcttccaaatgggtttcttctttggccatcaatctgtgccccctgccatgctctgcagacagcaaaggccccctgataagagctggcattatgccaggaagagcccttccagccccctcttctctggaacttagagtcttctcctgcttctaggagagaagggggctgtctgctttgaggcagatccacctgggttaaaatccagctcagtcgcttcttaatcatgcagccttggccacatcacttaactcctctcagctttcacatatggtgtctggtttagtctttacaaaagctgtgtaaggtcagtgtcactgtttattcctgtctatagatgagaaaaccaagctggtgatatggggatttgagtctgtggttcgattttcagaacattcccctaaaaaaagcgggctgcagaggtctgcttccaacagtcagccgtcaattgggttttacaacccttatccaaagctgagagatggaaagcccggagtcttgctccaggtcagcctggaagtccccatcttatagcaacagccccataaccatcttaccatgcaggaagcagatgaacaaatgcttgggtttgttaaactccagtatctccccgatgtgggggctggccgagccaaggcacatttttacttctcagctgcgccaccaaataacttttcctttaagacctggctctggctctgctcctccctgatcttgcattttggacagcctgttttttacacacctcacattcgtcctcttgtgtcctctcctcccctttcctacatggtaagccgtgtgtgggcaagactgcacctagtgtgctgaatctagcaaatgctcagaatttgcagaattgcttttgagaggctacacctggagggaagaagttgagggactgtaatagacatacgtacagtatcatcatcagatagtgtattaaatatcatctccacagttttgtgctccattgtaagttgtctccggcatctcttgccctgagaggccttgatggacatgacgagggtctcttctgcagccgcatgtccatctgccttctccctccagctctgtacagttcctggaatgcatcaggcagtctcttgtttgctgctatttctccctggaatgcccttcttccttcagttcacttctgggctggactgtttctcacctccccaggaagccccccaaagcccctctgtgtacctgcccctgtgtacccggtgctaggttagctgcattcctctgagttccacagaatccctgcaaagcacctgggaacacattaccatggcagtctctctgcttgtctgtatctgtccaaagattatgcattttccagggatgaagctgcagttcatctgttcatttccaatgcacagaacagtgcatagcatgtaggtgatactggttgaatgaagtaataaatgaatactttcttgcaagcctgcatgtatgtatagacgtggacgcatgcacagatagcaggtaatgattgttttttgtgcactgtcatatttcatccctgtaaccttaggaggcatcggtaccacttaccagtaaggcaagtgaggcttgtagatggaagggaaaggcatttgaacccgggcgaaggctccagtgtctgtctttttaaccatggcattatgctgccacttctgacagtaaacggacactctcttaaagaataagtggcgtcagcaggtgctgactgatttcttagcagagtgtactagaagtacggctgctggctgcaacagcacaggtgtcccctaaaaagatgggtcttccagacacagctgcagcctaaaaggaaggggagaaccaactccctgcaaccattggcctgtcctgaccctctgccaggttttctagctgggatgagtgtaaccgcaccagaggtttaaaatccaaagggagagtcctgcctttgatcactgaaagagagggcaatcaaaagctgagcactcttgtcactgagcgcttcatgctgactgccaagtggtctcttcctgtcccagaaaagatagcaggtgccagctgagtgggcagggctggggcctcaggctcagagtcttcaaagccaccacccaaatctaggagatgagttatgatttccggagctctcgcgtcgacctcccatttggcccccacaggtggctgatggggtggttatgttacttacctctgtcctgatcagggatcaggacaccaaggctggcaggcggttggggagacagggagaggtgagtgatgttaaaccaggtacttagattcccgtggctgggctggacctagttctccagattccaaatcccgtgctctttcccgtttcctgtaagggttcactaaattgttcataaactgacgaaagaggagaaagggaatcaggctggggcccgtgtaacaaagcccttcctgtgtctgagaaacgtacacttctgctcagcctttcccccctccaaaagaggccatgcagagcccaagctctagagaaggttcaccttttgaggagctgagatcctcctgggtccttgtaacctcccctcccctccagcaatgcagtccatcctggagttcagctgattttgccacccaagtctctctccagcctgcccttgatctctgttgatctgagagtccttgttaacattaacaaggtaacactccacactccagcatgccctgggccctccaggctgttgtccatgctgtgatcttttcagaacacatctgatcaagttactgcctcttgctttaaggtatggagacaaagtccttccatggtctctgagtccctccaaacccttctcatgccagtcatgccctgttccctccacgcccacctcactggtctcttttcagttctccctataccccaggctcctttcctcctaggactctgcattcgttccctctactggaattctcatttcatcttcagacatcagctcatgtgtcatttcttaggaacatcttcctgacctggtggtaccccttccaaggcacatcataattttcctttatatgtgtgaataattgtcctttattcacttactctgtacgcttcatgaaggcaggactgcagttgttttttctcatgtcctggtacacagcaggtgctcagtgcctgctatgtgataggggagggagtaaatggattgccgctttccctaaagctcccctgccccctacttcccactcagggttttggcctgtgtttgaccaatccatggacgtagacttggcaagagcttcaggtgtcctgagtgccaccaccagcccacatgtgactacctgtgttggagagggtctgcttctggcaccctggctgctgaatggtagaggatgtgccagccctggtgccaaaactgacttgccctggggactctgggcttcatgttgtcgcttgtccatcttctggcaggtgctttacatcttggtcagggagcacattcacccccgccccaccactgtgcttcccacagttcagcaggagccacagatttgcctgtccacaggacccagctcatgcctctccacatgacccagctcatgcctctccatagctcaggcctggccacaggacccacttcatgcttctgcatctcagcctcctccatccattaccatctagcagtcagtttctgctatgtttttcttaattaaaatcctgtgcctttcagcataatgttatcatgaggagcctggtgatctgagagtccttgttctgccggtaaccagctgagcacttttttttaatcatgcactctgtcctcagaaccatgttcttcctgtgtgtggatttcctgttaaagtttttctttcctgattccatggtgaaggagaccatctgccctcccaaatgcttggaatcctgtgccaggctgtgatttacattctgccatgtcacaggagttgtttttataggtccccacggaccagactggtcactggcttaagttcttatcaatattgattgataggggacctgctgtggacagcaccggagggataggtccatagataagctacagctgcacttctcaagttatttcagcaaagctcctgagacaaaccatgtgagggtgcctagcatgatgcctggcactttgttgatattcctggagtgcgtgttgaatgaaagaatgaaggaaataattagaaggcagcatttcccaatgagggtcccttgagatgctcagggaaaaacaaatcaacagcagcaataacagaaggatggggaaatggttacatggccaaataactttgggaacctgtgtgctgtttgatcctctctgagattcatacttctgaaacatatgtgactcagaactgtttcagtcacattaactgtagctacttggctaatgcttccagaatacagagtagaaagcggaaaggctcacaggaggttcaaagggatgaactgaggaccagagagaggggacttggagatacttgattaaagattgtagcatttcaccccagtctggaaggatgagcaggatccccgtggatggagagagaagagctttgggatgggggacagggatgagcagagacacatggacaggaatgcccaagacactgttgggagctagacgtctggttttagaaaaggtcatgctggaaggcagactaggggctgctcccacaccagcagttcctggtatctgaagctgctcgtggaggcttttgtgaaattatgaatgagttattgaaagccttagcattgcccttctgaagcatctggactttatctgaggagcccttgtttcccagccaggagtttgagtcagcatcagctgtggagtttcttgaaccaccctgtgtgtgggccacagcccaggaattctgattctgtgggtagagaaggggtccaagcatctggatgttttcgaagccccctagatgattctgtgtgaactcccaattgccaatgaatgccagaagcagtggggggttctttgagtggcctcctctgggggccaacagatcagagctggtcctcctgcatttgtacaggcaggggacatgtaatggcaggggactcactcaccaaataagcttgggacaccgtagacactgtgatccttgtggagattcataagtgatatcttagcgcatgaaggctctgagaagggctgctgtaaactcaacacttgaggaaataccatcaggaactctaggcttaaagatgggtatttatgtccatcgggtatttcacccccactgtttcttttatgaatgtcagtatttctctttccaggctttccagggtgaatgcctccattgttggagttttcatgaatgccaaatgcagtcagccttgctgccatggaggtggccaccactctcccaaagaaggttcttaggggctggcctggagtagtgaaagcagttgtttgcttacaaaagcctattcccttagtctttttctctctgctacctctgacctggaaagacaccatgttgggtctgaataagacgttgctgcctcccaggctcctttcttcatctctgtgatcccgagcggagcctgcgtttttctgacttcacactccagagggacggaaatgactggggcgacaccaatttggagctgcagcttgcaggaagctaactgcacctctgcagacacttgcttcgtgctttaaactggctaatgggcagccacatgactttttctcttgggccttcttggtggggttatgaagcgttggtgaccttaaaggaatcaatagaattgatgggggagttatccccgccagcccgcacccagctaacattgggatttcattctaaatgctcgtttctggtgctgatcatttatttgttcactcaagccacaaggtgcaaaggaagcactaccctctgcctcttatctccagaggatggtcaaaaggaaacccagtagctgcttctctcaaacttgcaaagagaaggtgctaggaagcgctcccatgggctcctcaatagcccagggcagaggttaggaggcaagttcatccgcagcaatgaaaccatggtgggtctgaagctggggccggaggctgccccatctggggccagtgtgtggcaggcacttgcttttagaagactcccagacactgcaggcctcctctcccacctgggctttcctctacccctacgcaagggaatggcttagacacctccagaatcgacagtgtaaatgaagaagagactgacattctggattattgcccccataggccaggagtttgagtcagcatcacctgtggagtttcttgaaccgccctgtttgtgggccacagcccgggaattttgattctgtgagtagagaaggggtccaagcatctgtaggttttcaaagcctcctagatgattctttgtgaactcccaattgcacatgaatgccagaagcaatgggggggttctttgatctcccctgggggccaacaggtcagagctggtcctcctgcatttgtacaggcagggggcatgtaatggcagggaactgacctaacaaataagctccccctgactgtataagcaagggtctgaatatgtttccacccagacagtgaacctgtggcatgtcactgatggttggttcataagtttttttctgttgcctcagttagtgtttcttacgaggctataacagttacccttcaaagctttgcaattcattcattcattttaaaatttatttattagattctttaataccccttgagtttgttaagtgtctgctcttacggggcgtggtgctcacatctaatgacagaactgctccatccttggtcccacgtggcttctggcttgggagatgagaaggactcaggcaagggcatccagcctgcacggggcacattagcaaccaactcggtggttgctaaaccttgatgctattccgtgacaccgtttctcctaggggtcaccccaccttggattcacacccatgcttccgtcacagtatttttctacatctttattatttcttcctctttccctttttttaagttatgatttgaagactgtcatttatctcatctaagacctccctgctctctgttctcttctgtctgtgggtctcatgtgttgggaagctcctcatggcaactcaacattcagaaaaacaacttttatagattcaattccccacaaaatacctgaatgttaagcacatggactttggagctcaggctgaccttagttcaaatccaccctccctcacctcccagctctgcattcttgggcaaggtggaatttatagcctctcaatgaagcgttggttttctcatgtctggaatgataatgttaagacgataacccaaaaagcattggctaccattgtaattactgagcagttgcatgcattagcttcatctccccttcttgggagccgtgacagtggtgtgttgacagcaatgttatcaaaggaaaataaaaagtcaaggccaacttcagtagagaagattgaaagcagaaatacaccgagagtccagcaggtacactgagccccatgataaccactgccttgggcaacttcaattccggggaactggacatggaaaccaaggccatggacaagtacattgcttcctgacctggcctgctgcctggccctctggaggtaggagctcttcttgaccacagagatggcccaggaactcagcccagcccactttctccatggctatggctgccccacttcaccttctttcccttctctgctagctcaccaagcagcgcacacagatacatctgcagcaagtcgtgtatccccatggctctgaggaacactacacatgacaaggagcctgagggtttcctccatgacttgaccgtggatcacttcttttatattaattattattattcttactgagctcacacctgtgtgccagagacactgggccacatgctttacacacttgggtctcatttcatctttatagcagtctgtggggtggagttctgtgctccagtcacttccatatctactaaagccttgaagccagaattcaatcctgattacctgactccttagaccaggttcttagccattattttatacaacctcattcagcaaaaccttttctacagtacaagcctcctctttcagctctacaattctttcttccttttattaatatttctccctccctctcttccctagttctcttccctcaaaaaaaaaaaaaaaaaaaaaaaaaaatggactaagtcccagatccatgccagatctggtcattttccccaacctaggcagaaattttttattattattattgctattactatcattatttcttagaattaagctgcacctttgactaccaggagtggcctgcatgcttaatcttcaaaccaagagcagctcagaagccagaccagagtagcatactggtgacaagcacatgccatggcagcaggtaccagggtttcagtttctgctgtgctgctctaaccatgggacctctctctgcctcagctttttcatctgtaaatgggggatttaatagtcccaagatcacaggtttgctgtgagcattgtgggagcagataggtaagcatttagaacggcatttttgcacaaaggaaatgctctgtcaacgttagttttcatgactcctccaaaatctgcctttctccgtcctgaaggacccataagtttccaagaactcttaatcctacaggaatctcttaaagactagcagtagaaaacctgttttccctagagaccgctctcctgccgctctttccacctttgtgtcatcttgctggtgacagtaccaagctcctaatgagagttgaaaaggtttctgcagctggtgaggctgcataattcaagccagcctacctcccacctccagctcccaagttctgaggctaaatcggtaggcggggggtacatggctaagagagtctgcaggtgttcaatggcctggtgtggccttggttcaccagtttctgtttgcctgggccgccccattagctgctgcctccttaaaaagtcagaattttataggcttaacaatctgtttgaatgcaaaagcttgaaacacagggttggccctaggagcaaactaattaatagcccttctcaaactagggttttggaaggtaggctgaacctttgaaaagcaatcatcttttgagggtgctgcaagtcattgcaataaaactggggatgggaggaagaacttggaaggaaatagcgaacccaagaggaaactgtcatttctggaggcaagttgccttggtagagggaaaaaaaaagaatgttcttcatgcaaataaggcccactaaggcttcctcaagtcaaatgattcagtcaaatcattctcaaacctaatgatttttcacatctaattcaaggagaaattagttattagatattaagacaaaagcaggcagacttctatcttgacaaggaatccttcccgctgaagtggaattatctccagaataattaaattgcttgctgaagtataaaagcattccattaaccggagttgcctttgttgaacagtgccttcctcatccccaaacaaatcatgatgactctgaacaaggacagggagataccaggacctaaatagataatgtgataaaactgaaatcatcatcagtgtcatttctgagccaaagagcaaagttgctaatcagcaaatgctggaggtatcagcctcagcccggcagcagttttacttgtgaccaagcgtggctgtgatgctttattctccaggagtcctagactctgcagattctgcaccctaatgaaaaaaatgaaggctacagtgaaagcacggcagaggatcgttttcctggaatgtccccagcctgcctgtttgacattggcaatgtttccagaatttagatatctttattccaaaagagcactgtgattgagaaatggcgttattacttgccaaaacacataaaccaccgggacattcaaatgtattcattacaaggaggcactgttataacccgacgtgatccatactgctcttactacattgtgaaacttgttgttgtgtggcatggccgacaggtctcctgccacaggtacactacaccatcagaacgtgccacacagtatagcaaatcagatttcactcattcatagtgatttatgaggatagagttgtaacatccaaggggcttctgtacatgaagataaatgcttacctcattgtcctctgtttatgcccaatgaattcatctgtatttgttgaacaatccacatatttaaatatttcacagtcaggattactctaaatatttgtaccatactttaaacataatgtggatttaacacaggaaaatttcccaacatttacatataggtgttataaaggtaaacacttctaaatatttatttgaaatgatatttctaaaaattcagatgatggtaaatgctttaaaccttgtaaaaatagacaaaacacacacataaagaccagtacacttaaaatcgaggagggtataagtgtattaatacaatggacttgaagttgttttcttattatctttattcttattcatagccttttaaaagtgttatttttatttgtgcatttatttcatcagagagttgcctttctaatgtttcaggaattttacaaggaaccaccacagaacagccaaggccaccagctctggttatcatctggttataacacaggattcggttgctcaggctttgccaattccaagcttttggtcatctggctcagtccatttgcataactaagttctttttgttatgtcaaagaaccctaagatgccgatcttctgtgtagattttcattcttgaaacttgataccattcctggaaatggtaaattctaagttttgtatatctgccagttcttgacttattgagcttgtctgttaacattattaaaaacttatgcatcccctattattattttattctgatgagttgggccgcttagaggtttcatctcctacgagatgagattgagcctgataattagctctcttctttaggacagctggctaattcatcaccttggaatgcagtgtgagactccctgcccacctgtttattttgcatgccaccacggcactgatcagtttttcctagacgtggtgtagtacctccttcctctgggactctgtgttttatctgttctgtttgcataggtggaaacaagtaaactgcatgtcagatactccacactttatgatcgcagcagcacagacttccctaactttagtctagtctctgggaaaccacctctataatttttgctttatttgcattccacctgaaccattatgcacttaagacttctctttaaataactttaaatctacttactttttgtagcctagcagtgtcttaagccataacagccatgaaaccacgcattcgatgtatcagctgtatttcagctttgttgtaaggacatattaaaatcatggcacaaatattgaaatgacagggttgtcctggtgccccagagctctcttgtacactgccaggatacgtcataccataatttaggagacttggctgaagaccacatgccaatgattctgattgctgggaatatccaaataatgtgcttgttttcaaaggatttttaaaaaatgaatctcctattttaaaagcaccaatttaagggaaagtcttagtggcatataaaaccacatgctttaagaaaaatagagtaaaataaagaaagaatgaagtacaagacctcaacaattcctgctttccggctctgtcattatttaaagtggtgcatgaacctcagagcacttttgcccatcaccagctctcatagaagccctgagcaccaggactgagtgggaggcttcttctagggtagactgggtgatgagaagagaccccctaaggagaaggaaacacattcagcaaagatctacaggcagagcattcttgtatagggaagacccccaaggacaaagacctgggtggggtggacctgggtgcaggcgagaaacagccagagccactggggctggactggagggtgggaagaggaggggctagggggtgtgatcagatcactgaggggcagacctcgggccatggcacagcctatggattttgaccattgcagggttttgagcaggaaactgatttgagctgatctcgctgactgctactcagggaattattatattggatcaagagtgaaaaccaagaccccagttgggtggctctggtggtctccaagtgagagctgatggaaattttgccagagaggtagccatgaagatggcaagaaggggttttattaggcatgtacacattttggagagcacaagaatttcatatctttcttgaaactgttaagtatattttcttacacatatatatatatagatccatcaataggtatattgacatatacttaaatatattgatatttatactttattttatataaacacacacacacacacacatttttttttcttttgagaaacaaaccccaaaccctctgttagtagaggatgaaaatatcttctgacattgctttaaaaaaattttactgtgtctagtgaactgtaagaaaagtcctggtatagtctctcctgttttagtagaagatagtaattggcaacatgtcagtgtacgctttgaagccagagatttcacaatcatggatgacttatggggtgtagattttggccttagcaactgggtacctctggatgctgtttgctgaaatggacaagagcgggccaagaaggggccttaggagcagggagctataagatgggagcacagggtgtgaccttgaccctgaccatctgccttctgtctccctgcagtgatcccgaaggtcaccaagcacctgctctcaaaccctgtgttcacctgcatcatcctggccgcctgcatggagattgcagtggtggctggcttcgctgcctttttggggaagtacctggagcagcagtttaacctcaccacctcttctgccaaccagctgcttggtgagtgtgtcctcaggcctcctgagagggtcgggggagggtgtcctgtgtgtaaggcactaaaaatttactgagccctgctgaagaaccccactctgctctgggcctacagcaacaagatatatgtggcctctgtgcacaaggaatttaaagtatattctcagagtaagatttgcctgcctggatcagttgctaaaagcacatgataataaagagtgaaaatataaaatgtacatttgagaggccagtaagtcgatagatgggtgtgaaatgggaaatttgaggaagctatgatgaagaaggataaatcttgaaaggttagcaggttttaatcagccacataaagttaagaatattcttggcagcatgagacccatagttaactgcagagcttggaagccatacactccctactcctccctgtgcccacaacagacataactaatggatcatgacactccttctccccaaggtcaggcatggctttacagttctttaaatcatagactacaggtttctactcccaattgttcagagttgacatactaaagaaaaccagtttgcactcatgagaagcagtgttgctcaggcagggtaaggaatgtggtcctgcagcatgtcttagtttgctttttgttttgtgacaatatatcatcctttacttcaaatgacaggaagctgcatttgttgagttaatcagctgagatgttgataagtagtggacacaacagcaacagacatagcagtcaaacaagagggaagaatcaacaatggctctcaggtttctggcttggagagcttgtggtaccatttgtaaagactggaaataacaaagaagaatcagatccatgcaaagtttctggatcagacctgaagctgttgagtgtgagatgcccatagcatatctaagtgatgtccagtattcagccgaggggtcaagaagggtctctgggatgataatcgatattatatgtagtagtggaggttcagttgcctcagtaaatggatggtagttgaggacatcggagtggaatttacgtaggaaaaaatgtgtagagttaaaaaaagataggtgaaaccccaacctgaagaaatagaggagtctgcagagaaatttaagcaacagcacccaaaagaaatgcagagaatgtggatcatggaagtcaagggtgagatgattccaagaagaaagcagccatctgcaatgtgagcagtcaagcaaggtgagggcccaaatgtctctgttggctttaatgatgaggacagcttgcagcctgtgtgagggctgtgtccctgaagtggcagcggtggcacccgttctgtggtgtggagggaagcccacgagagggaaggagtagacagtgagcacgggacttagccaggggagaaaggagagaggacatggcctgtggcatgtgttggagtcgagggagggagtggtgactatgtggttgctgggacaggaaagacttgagcaggtttctcagtggagggaaaggagcccacagctggggatttgcagcagagagagggaatgtggtggacagcccttgacagaggagttcacctgttctcctgaaagagcagagggagggacacgtgatggaagctactgagaatgtggtgatacagccaggcatgggggcagctacagctccacagacttcgtcttctctgtaaagtaggagtcagattgtctgctgagaggaaagggaaggtgatgctttctgatcttcccttttaaaatctcctgtcatgtcacaagatggccaagaaacaaacacaaaggtgctaaccatcatgagtcatcagagaaatgtacattggaaccacaatgaggtgctgctaaacatccaccagactgatagcaccaagtgttggggaggatgtggagccactggaacttgcatacttcgccagtgggaatgcaaatgggtgctgccactttggaaaactctttggctgtgcctattaaagctaaccatatgtctgtgctgtgacctatcagttccatttctggtcatctgtccaacagaaataagtgtttatgttcactcatttacatagcatatgtaataatgtccagagctgttttatgcataatggacccaaacttgaaacaacccaaatgtccgtcaatgtaaaatggataaattatagaatgttctatggtaaactattgcacagaatgagaaggaaagaactttgatacatgcctcaatgtggttgaatctcacagagttgaaagacatgagactcaaaagagcacatatttagatgaattaaaaagaggaatagttaattgaggtgacagaggccagaatagtggttacctttgggggaagctaactgggaggcacaccagggagcctcctgagctgctagaaatgttctaaggttaatctgagctgtagttacaggggtgtgtacagacgcaaaagttcatcaggctgttcccttaagctctgtgtacttcacaggacataacatatctcagtttaaaagaaaaagtaggccaggcgtggtggctcacacctgtaatcccaacactttgggaggctgaggtgggtggatcacctgaggtcaagagttcaagaccagcctggccaacatggtaaaaccccatctctactaaaaatacaaaaattaggcgtgtcatcccagctacttgggaggctgaggcagtagaatcgcttgaacctgggaggtggaggttgcagtgagccgagatcgcgccattgcactccagcctgggggacaagagtgagactttgtctcgaaaaataaaataaataaataaataaaataaaatgtaaaaccctatcacaatgatatggccagattaccacccctctccctgggaactgccagggtaccacaagtcttatgtttttcttttacacaaagaactctctaccacccaccacttggtcaattttacctccaagaggtattggcaaaatgcagtcagccctttaatatctgcccgacagagatagggtaaaatacacctctttataattaaagttgtaacttctttgttatccccaggatctcaggtttagcccttcagcacctgaagagtttatctctcacctgctgactcctctgctgctttttcttccattttgattccatttgcacagttgcttcaactttgggcagtgctctgtttcagaacagatgcctacatcttctatcgacaaacaaatcaatagtcttcagggcagaaggtcaaaaaaacaattctgccttattgcgcctttctgtctcccagtgatttctgtctgctggtgtgcttggcaggaggcaccttctcctgagctgggcagtccaggcaagcagcacaggtgccctctgtgtgtgccctgcccttggtgacagtctagtcagtgtggacgctggaggctggctgcaggaggggctggcagtgggcggttagagaaggcagacttgggagatgaggcccaggcagtcatcccagagcatcagcactggccccccttccaccccttgcaaagtcatcagcaaatggggcagagctcagagaagagcaacacaggtgattaaagagctggtggtgctgatttgtgagtgaagataaaaaggactcaatctgcataggttaacgtaatgagaatggaatttcagggaagttctgatcaccgcctggagtgttaaggacagcacatacatcagggagggagggggcctgacaatggcttggagaaaaggtgtgaaagcctgtgattgccatggttaccatccttgacaggtgacacccccactgtctctgctaggaaatgaaacaaaacacaggcctgctttctgggtgtgggcatgttgtcactgatgtccattcacacacatccaatctgttccttagctcattcattctgaaaataatacttggatgcccactccgtgctgggtaccatgctagacacagagaatctaggcgggactgaacaagacaaaaagggtttttgtccacaggaaagctgtatcctagcagagagagagagagagagcaagaaacaagaaacccaaaaataaatgaggctgcttcaaagagctgagagagccatgaaaacagtatggaatctcagggtggggatgcatggatctctacatagggtggcctgggaaacctgtctgaagagagtaggggccagccaagtaaacacatcgggcaagtgtcccaggagagggaactgcacgtgcaaagcctggggaagcagaactgtttggcctgtcctagggagagaaaggagggacagtggcatggttgggatgggcagtgcggtgcaggatgaggataaagaggcacccaggagctggctcatgacatcactcctataccaagggaagaaaaccaagcacagatactccaagagcagcagatgataaagagatattatatgtcattttaagtatgacttgtgctgttttcttgcagagctatacccccttattatattttctcaccccaatattaaaattaatttgcattcccttagcacataccagctggttaatgtagtcagttgacctagaggtctgttgattggcaagaaggcagcctagactggaaaattggccatgcatcatctacatggtagataaatgacacgtagcaattgaaagctgagttttagatgagatgaatcagaatggagcaaaaccaacgcaggagcttggaaccctgggatcctttggtcctcctaaaatgccatggtctctgcgaatcagaaataacaggtttatggtcctgctcacttgtagatagccctgggtagaagagagagaaaggaaaaaatatatatgccatttattcaccaagagctacaaaacatattgattgatgccacttcctgaggggtggcggagctggttcaaacactctctctatggcctggtgaattccgtgacctttaggttaaacagcctccgtactttccgtgaaaccctcccttcttgcctcattagaagacgaggagaaaaatccctaaatgatctcaagtccgcttcccacatctcatctcaaaaatgctcacagagcacatcactgctccgtgatatgtaccctcccgaaggcatgtctgtgttcccagtctctctgactccatctcttggtagtcccctcttcagcttgcgtttctcctgagggtgccccacttagcaggacaggtgcgtgcacttagattcatgaagcagagttgctttatgtctgtctcccccagttctccatgagctccctgggggcataaatcaggcccttcctgaagactccagggtcccatggaggcagtgacaccacagtgaggtcatagggcattcacgggactcagcctcaggcctgctgcccgcctgtctgtagactggccccaccttccctgttcacagccctgcccctctattttccttccagggatgactgcgatcccgtgtgcttgtctgggtatcttcctgggaggtcttttggtgaagaagctcagcctgtctgccctgggggccattcggatggccatgctcgtcaacctggtgtccactgcttgctacgtctccttcctcttcctgggctgcgacactggccctgtggctggggttactgttccctatggaaacaggtgagtactggcagtgtctgccgccttcctgcctgttcagggaccctagcaatctccctctgcagtaggttgagggaaccagctttgttcctagtgacctgaggagacgcatcacggctgcctctgcatcttactgtccacgttggagaatcagtagaaccctctgggctgagaaagcagacctttccactcaaaggctgggaagcactgggggagaagagaagccgtttcctccctggcagactcacatcgcgatttttggcatttgactttaggaaaaatgtgaagagagaaaataaaaattttaattcaaaattcagctcaaaataaaagacagaattgatttgatttcaacaattccttaaactatcagaagctgtcattaggctcacatggcaattacaggatctggcccatggcaggtgttcttaagtgtagcgagggaaagggggagaaaaagggagggaggaagagaaggaagttagttctcataggaccacttttctttcttcctagtttttatcccaagacttgggactagagtccagtgagaattgcccttagagggaattatggggagtcttcagctatccagtatcaatagctgtccccttttccacatgggactgaggctgccttggaaatccagcctggagcatcgaggctgaagcatggctggcctgcaggttaccagtttctctctctagagccagactcttcctccaagcagaccacgaggcctgctcctgcgcttgtgccggaagatgcagtggagccagggcttctctgccacccacaagggtgagcaggcagagtgggagagcagaacagaggcagctttctgtatgtctgtgtacaatccaggcaccatgtgcccctccttcccctttacaccatcacggggttgccccttccaatccccgccccagcctggccccgacttcgtgttcagatatgtcttcttcccgtttgcacctgctatgcataacagctgtctcaagtagcagactgctcaactcccaaggagtaaagggtagtggttaggagcacaaggtcttactataatgacgttattcttccatgaaaaagaaaagaaaagtgtatatcctacagtcagacagtcctagttccagcgcctcctctaccatttatgacttctgtacttttggacaagtcacttaacctggctgtgcctcggtttcttctctaaagcccatggggttataatgagaataaatgaaataatccatgcagtactttgaatagtgcatgacgcataaattgccgggtgtcgccatcgtcacctttattattatgaagtgctctgagccttaggagacatagctgaaaatgatcagagtaaagaagagacatttcctctcttatagagctaatacactcactctacccttttgttcttttttcagtttgcttgctctagataactttgcctttaatgatgcaaaggaaaattaaaacaccttagtgttatttttctcaggacattgaatcaattagacaataattattgaagtcagtctggttgaagcagtgtagtaagtaagcatcatgaggcttcctgactgtaggggaggaataaagcaaagagacaagaaccagcccaaagagggaagaagttaaatcctcagtggtgcaggcatagcagtgttcaggacagggggataagctgaggccttagcaatcaggagaggcatcgtggagggggtggccctgagcagtcccaactgccaccagcccagagggcacatcaataccagtgataaaaagcatcttcctcctcgcttcatgagaggggctggagtggactcagctcccacccagcccaccacccaagctggcatcattggccagggcacaacccacgtagctctcagcagtggccctgggctgctccttgctggacaggataggctaaggttggtaaaggaaaagggaagggagaaccaggtaacaatcccataagcagggtaccacgcgactcatcacaacagaggcaaaaggctgtcactgggggcatctgattccgaattgacctgtttctaatggcttccgtgtttcctttcttttccagcacagcacctggctcagccctggacccctactcgccctgcaataataactgtgaatgccaaaccgattccttcactccagtgtgtggggcagatggcatcacctacctgtctgcctgctttgctggctgcaacagcacggtaatgggatggggcaggggatggggcaggggattcaggcagctaaagtggcttaaaacccaagtttttgcccaggttgttcgccttccctgtgactttttcttagctgttgccttgctgtagtggaagatgttccatcagcaggatgagaggactgattcaggtcttcttgctaaatcaagtgggtttgtaggaagtctcattgtgcaactgaaagtaaaaattcaaaggaagctgtatatatggaaccaaaggaaaagatggtggttcaaggtacttgcagtgtcaatgaaataggatgtctgcatgggtagtgagctccccatcaccagaagtatgtcaagagaggcttaaaaaccatttatcaggaaagacttcttccagacctgaaacactctgacaccaattcagcttctttcctacccagtttgctttgccattttcctcctaactaaatgcctcccacctctttccatgttcctgacacatttttgggaggaggtgggttgctttttcctgcttagcgtggattttacaattggctgtcagcccacagctttccacgctctctccctgaaaacctgatgctaagtgacgggtcatccattggtgctgatcccaccttccaggagtccttggcacctgccctgtggaggccccgcccccatctcttgcttggacccgagcagtaggtcctacctggcctcccaggatggccccttatgtccttcgttttcttcaacactgcagtcagaagggtttctgtaacatagcaaatgaccctttctcatgctactctgtcaactagaagatcagttctaggtgccacgtgtcttcagctctacctcctttcagtttgtggtgttcagcttcccccatacaacctgtcttttcatacacctccctccagctggacaggtcctactcaccggtcagtagcctcctccaatgtcccctcctctgaaaccatcccttccctttttatctttggggtttttctccctgaagtccttcggtgcctctttctcctaaagacattgttctcactttattacgatgatttgctagaagtgtctgtcatctgctctggtctttggatttcttaagcaagggccagcacccagaagtactccatgaatgtctgtgcaaggcatagtgggaaggaaaatatgaacccccagtggcagctttcaagggacttagagttgagatcattagctgctgcttcttcctacatcttatatctttcaggagcagcaatttctctgaaagaagaaaaatggatcatttattttcattttcaaagatttcatttttccttgtgtttagcatttagattcctggccagttattaacattttctttagagaaaataaatcaccatggggggtgggtgggagaaactgattttttaaaattagatgataaagcaatttctttatgtgagtggaaataaattttaaaagaagggatgggccttgagaatggttcaaataaaaacacaagccattatttttcatgacaacaatttcattaacattttaatatccagaaagttacattataaatcagtctcggttattgtcctgttataagaattaaattgactcagtatagtctagtgtcctgagaccaaatgagtctctattccagggaatgcactgaccaaaaaaattatcttaaaaattgcatttcccctgatcttgcatgtacaggagtcttattgaataagagccttaccaggcccatctgtggctgcatcccactgctgaaacagcgaagctggagaatgcagttatcagactgtaagcttctctgcttacctctggacctactgtttgtcccccagacacctgccttttattcaggttactcgaggcctcacattgtctgctggggtgtaggtgaggcaaggaggatattctcatgcaattgcaatgcagagacagagaaaccaccaggccccagagctggggtgaggcatacagtgccttccctgcagaggcagatctctagatgccctggcttccaacaagtggatgagggatttggagacccagagcaatgcttatcctggaaagggacccttgtgacagtctagccttaaaaacaaccacaaccataaaacttgcagcagcagcagcaggctttgtcgagagcctattaaggtccaggtaatggggccttccgtgtgtcactcgtgacccatggcagcttggcccagagtcagagaaatctcaggccaacatccaaaaatgagtgaaaagcaatttaaatcctttaaatctctgctgcagtattttgggaaaatgccaaatggtggctatattcctggtatgtgtactccctccctcgcccccttttttctccactcttcttgtctccaagttcggggcaaaaaaaaaaaaaaaaaaaaaaaactctttgacaagctaaaacctttcacctcctccttttcacagtgatcccctggaattctccaccttccccaatgtgagttcagccattttccctggtttcatcaattcttccacccacggcctcaaccctgtgtatattatctcattgatcctcccagcacccttgggaaataggtgttcttcttatttcctgaatacagatgaggttagtcacttgcccaaggccatgcaataggaagtgggggatctggcttttgaatgtagggtctgtccaatgtcgagtacacatggacaccaagaaaggaaaaatagtgtctccctctgtacctcccctaagaggtccaccttttttctacctcttcaaacatgcacttctcattcgagacatttatttggcctttaccatctggccctggctgcctctccagcctcaacctccctattcctcccacctcttttttttttttttttttgagacagggtctcgctctgtcacccaggctggagtgcaatggcacaacctcggctcactgcaacctctgcctcccgggttcaagtgattctcctgcctcagcctcccaagtagctgggattataggcaaacaccaccacacccagctaattttttatatttttggtagagacggggtttttcaccgtgacggccaggctggtcttgaactcctgacctcaagtgatccacccgtctcggcctcccaaagtgctgggattacaaggcctctcacctcttaaagagccacttggtaagtggaacttgcagttccccaacacatcaagctctccctgcccctgggcctttgcacgtgttgtttctcttatctgcagcagtctctcccttctaagctctgtcttatctctcagggctgtctctccttcaccactgctgagaagccttctccagctcattgcttcctccagggctgtgttagtgcccttcctgcaaacccctattgcccctgctcttgcctagcaaggctctcacctcacctgttctaatggctcatttactctggcacctccctcattaagctgcagggacaggggctctgttatggaaccttgcattctcactgtcagccatggctctggataaaggctccaggctttctcaacacccagctggaggccctgtactgacctcagagagccccagggatccaggggtaataccattctcttgtttagcagttggcaagtgggtaggttggatggtgccagtttcagtactgaagacctgatccttgctcgccactcaccactttatcgtttccatcaagacgtgaaaattccccataactcaattagatgtaaataagtcactgatcaaataattctgattatagggaaatctgattagtgttagtggtttcctgatattaaacttttcttcctgctctggattggattttttttttttattttcttatatctccttgagtgatagcaatggaagtttccaggcctgcatttaatgtacgacttctaattcttctcactgcatatgaccaggaagggtgaccaaaaaaaaattgagttaattctgtaaatttcctttggcgtgaatatatggtccagattgtttctgtacctttcactttcagaagtaattattccaacagaagcatgttagtatgctgtggactgatggctgtaagttgtatccttttgatgtactaaataattgaatagaaaaaaaaaaaaaacttccatcagccaccaatagaatgttgaaagtcagtatgagtccagcactgcagtttgtagggtactgatgatagatgactaattcatcccccccattccaggcaacaaatatttattgagcacctgtttcagtgaaatgccaagtaggttctgtggcggggaggaggacagctccattatgggcccaggcaggcagctcatggttcagtgtgacgggtctcaatacaggccgcaccttaggatcacgtgggagcttttaaaacatgaggccccactctcagagattctgattcccttattttggagtaagatccatgcatcagtatttttttaacctcctcaagtgtttttgatttgtaaccaggatggagaaccgctgttctaatacagggcttctcagtcacggcactgttgacattttgggccagataatggattgtcatgaggcgctgccctgtgcactgtgtttttaccagcatccctgggctctccccaccagatgccacccctgccctccccagccacaagttccgacaactgtaaatgtctccagacattgccacatgtccctcgggggatgtcatcacccccagtgaagaaccaccgctgtcatagaagggatgaggcatgttctataaattgtgtctttcttgaaaaaggtcagcatctaagctgacactgagtattcatcattcagtctcttttttcttctcaccatgaccatatttgcccactataaaaaccaactggagagttagatatgccatatagcaggggtcccccacatctagcaccagtgccagtctgcggtactggtactgttgggaactgggccgcacagcaggaggcgagtggcaggtgagcaaagctttatctgtatttatagccgctccccatcgctcacattactgcctgagctctgcctcctgtcagatcagcagtggcattggattcttacaggagcatgaacttactgtgaactgcgcacgcgagggatctagggtgcgtgtgccttaggggaatctaatgcccgatgatctgtcattgtctcccatcatccctagatgggaccgtctagttacaggaaaacaagctcagggctcccactgattctactttatggtgaattgtataattacatttcattatataatacaatgtaataatagaaataaagcgcatgataaatgtgatgtgcttgaatcatcctgaaactatcccccaaaccccactggtcagtggaataattgtcttccacgaaactggtccttggtaccaaaaaggttggggacctctgccataaagcatgttgcagcacaggaaacaaacagcgtgtctgccctgaagatatatttaatgtggcctgagccaaagtttaactgggcctccctgaaaaagttggaagatagctatcatgggacctgcaccccagtagggcagtggttggctggaactgagaagcgctggccttttgggcaggacatttgctgtctacttagacacagcccccaccactggccatcccttacacctgagccattttttaaatgtatgtttcctgtctggttccaaaggcttacggtttgcagccctcctcatatagcctggccctgtctgccagagctgatttaaaagtctgtacttatcctggtaatggcttgtcagaagggacttgtgactattctgaaatcaaaccctactggggcatcgccacctgggacacctgatatatctcaggccctctgctaggcattgtaagtgtagagatgaataaggaaaggagctcatgtttactataaaatgagatgtcatattattaatagaggtatgtccaagggagcacccaaagcaacacctaaccttaccttacaatatagttaagtgaaaagaacacattgtaaaataatacatagacaataatcccttttgataaagaaacatctaaatatatgcatatctttgcataaaaaatattggaagaacatatagccatccattcgtagatggatacttcaggttaggggccaaaaaactaaattttgcttatttgtttccagtttttgtgtatatttcaaaaatatctaaaatgattatcacttttccaatgaggaacagatttttttaatttaaaaaatccaacattaaaggttaggtggttaggttaggttctaaaagagggaagcagctgtgtagacaaatcagtgaacttgcagtatcaggcctgctggggtagaaattggttctgggtggggcaggggtggaaggagggagtgggcatgttctccgctgggggatggggtgaatgagacccccatctctgaaaagatgtaaaaaaaattagcagggcaggtggctcacttgagcccaggagttggagggggagacgtggcaagggccaggctttcatcatgaagggtagtgggtgtttggtagccaggcatggaaggacattccagccggaagagtgcacaggctgaggtgtgacaatttggacctcatgatgcaggcaggttttgagttggaagagagaaagctggagggagagatggaggggccctgtgttccttcagagttgcagtcatgcctttcacctttccgtgatctccccactgtgtcctatgttagatagctggagcagagtgagcctttctgctccccaaataaaaacccccttcctcccctcagcaggagataattaagatctaacaggacgtgctcaggctcacgcgccacaggttaccggggtgcaaggtggaaggaggtcttgctttcatctcagaatttttctccctggccattattcttcagccagtgaccccacaagggaagaagagatcgtatttcttcttgcagtttttcagtgtcccctttgccttgatcttgcaggttgccattggcgccctttgtgatgagatctgagggttatgtctggaaataccagctttggttgaaccaatgaagtgaagagatgctaagctacaaaaagacagtaataaatgacaggagactgtctgaggaacgtcagtgaattatgagaaaatccataagtgtctgggactcagagaagtatgttgccattcaaaggaaaacaccccactttattgtggtggtgtcccacgttctttgatatctcagctattagaacatcaggtgcaaaagatcaaagatctcacaggcaaaagcaggaagagcatggcctgtggtggtactccccggtaaactccctttatgaacatttctagaaactgccagagccaggcatggtggcatgcctctgtaatcccatctactcaggagctgaggaggggaggagcacttgaggccccaaacttgagaccagcttgggcaacatagtgagacccctatctctgaaaagataaaaaatgaggcaggcaggtggcttacttgagcccaggagtttgagactgcagtaagctatgatcatgccactgcactgcaaactaagacctcatctctgaaaaaaggaaagagaaaagaaattttcatgtatctctgctaactgctttcaaggaggaaaagcaaaaacagtattccaggggcgatcctctacctttcaagtttccatagaaggctcgtaatacaaatatccccatacaatcctcttagaaaaataatctttccaccttgaacttcgcttcctttgtacaattaatagggatcgatcatcaggattggatgtggggggaaaataacaggcagaaaacaactttatttgccagtatttttgaaacactgctgagcagtatcttgttcttgtaataccggctgtcaaaatagcatgccgactgcttccttcatcaatagaaaacaaatgcaagattccagagagtcatttttctatttttgtggtctctagccttcttgtaattatttattctcatcattgtatgtgaatagaaacatttctcaattgaaattaatgactgaaggtggaacagaaatacagttttcagtgatgtgctattctttcattgatttctttattttataacattttccattttgaatacatttatatgattcaaaagccaaaaagtataaaaaggaggatatgagggactctccctttcacctgtgtccgctatttacttcttcctcaacctgccaaatagatgattgctgtccttggtttcttgtacatccttctggattttttactgcacataaaaggccctattctgtacctcactattttgtttggctttttcagttaatagtttacctgggagttatttctaaattagtacataagggatgttcttctacctttttatggctatatagtattccatcgcgtggaccaagtagtctgtctttttttttttttttttaattatactttaagttttagggtacatgtgcacattatgcaggttagttacatatgtatacatgtgccatgctggtgcgctgcacccactaactcgtcatctagcattaggtatatctcccaatgctatccctcccccgtccccccaccccacagcagtccccagagtgtgatgttccccttcctgtgtccatgtgatctcattgttcaattcccacctatgagtgagaatatgctgtgtttggttttttgttcttgcgatagtttactgagaatgatgatttccaatttcatccatgtccctacaaaggacatgaactcatcattttttatggctgcatagtattccatggtgtatatgtgccacattttcttaatccagtctatcattgttggacatttgggttggttccaagtctttgctattgtgaataatgctgcaataaacatacgtgtgcatgtgtctttatagcagcatgatttatagtcctttgggtatatacccagtaacgggatggctgggtcaaatggtatttctagttctagatccctgaggaatcgccacactgacttccacaatggttgaactagttcacagtcccaccaacagtgtaaaagtgttcctatttctccacatcctctccagcacctgttgtttcctcactttttaatgattgccattctaactggtgtgagatggtatctcattgtggttttgatttgcatttctctgatggccagtgatgatgagcattttttcatgtgttttttggctgcataaatgtcttcttttgagaagtgtctgttcatgtccttcgcccactttttgatggggttgtttgtttttttcttgtaaatttgtttgagttcattgtagattctggatattagccctttgtcagatgagtaggttgcgaaaattttctcccattttgtaggttgccttttcactctgatggtagtttcttttgctgtgcagaagctctttagtttaattagatcccatttgtcaattttgtcttttgttgccattgcttttggtgttttggacatgaagtccttgcccatgcctatgtcctgaatggtaatgcctaggttttcttctagggtttttatggtgttaggtctaacgtttaagtctttaatccatcttgaattgatttttgtgtaaggtgtaaggaagggatccagtttcagctttctacatatggctagccagttttcccagcaccatttattaaatagggaatcctttccccattgcttgtttttctcaggtttgtcaaagatcagatagttgtagatatgtggcattatttctgagggctctgttctgttccattgatctatatctctgttttggtaccagtaccatgctgttttggttactgtagccttgtagtatagtttgaagtcaggtagtgtgatgcctccagctttgttcttttggcttaggattgccttggcgatgtgggctcttttttggttccatctgaactttaaagtagttttttccaattctgtgaagaaagtcattggtagcttgatggggatggcattgaatctataaattaccttgggcagtatggccattttcacgatattgattcttcctacccatgagcatggaatgttcttccatttgtttgtatcctcttttatttccttgagcagtggtttgtagttctccttgaagaggtccttcacatcccttgtaagttggattcctaggtattttattctctttgaagcaattgtgaatgggagttcactcatgatttggctctctgtttgtctgttgttggtgtataagaatgcttgtgatttttgtacattgattttgtatcctgagactttgctgaagttgcttatcagcttaaggagattttgggctgagacaatggggttttctagatatacaatcatgtcgtctgcaaacagggacaatttgacttcctcttttcctaattgaataccctttatttccttctcctgcctaattgccctggccagaacttccaacactatgttgaataggagtggtgagagagggcatccctgtcttgtgccagttttcaaagggcatgcttccagtttttgcccattcagtatgatattggctgtgggtttgtcatagatagctcttattattttgaaatatgtcccatcaatacctgatttattgagagtttttagcatgaagggttgttgaattttgtcaaaggctttttctgcatctattgagataatcatgtggtttttgtctttggctctgtttatatgctggattacatttattgatttgcgtatattgaaccagccttgcatcccagggatgaagcccacttgatcatggtggataagctttttgatgtgctgctggattcgttttgccagtattttattgaggattttggcatcaatgttcatcaaggatattggtctaaaattttcttttttggttgtgtctctgcccagctttggtgtcagaatgatgctggcctcataaaatgagttagggaggattccctctttttctattgattggaatagtttcagaaggaatggtaccagttcctccttgtacctctggtagaattcggctgtgaatccatctggttctggactctttttggttggtaaactactgattattgccacaatttcagctcctgttattggtctattccgagattcaacttcttcctggtttagtctcaggagagtgtatgtgtcgaggaatttatccatttcttctagattttctagtttatttgcatagaggtgtttgtagtattctctgatggtagtttgtatttctgggggatcggtggtgatatcccctttatcattttttattgtgtctatttgattcttctctctttttttctttattagtcttgctagcggtctatcaattttgttgatcctttcaaaaaaccagctcctggattcattaattttttgaagggtttttttgtgtctctatttccttcagttctgctctgattttagttatttcttgccttctgctagcttttgaatgtgtttgctcttgcttttctggttcttttaattgtgatgttagggtgtcaattttggatctttcctgctttctcttgtgggcatttagtgctataaatttccctctacacactgctttgaatgcgtcccagagattcaggtatgttgtgtctttgttctcgttggtttcaaagaacatctttatttctgccttcatttcgttatgtatccagtagtcattcaggagcaggttgttcagtttccatgtagttgagcggttttgagtgagattcttaatcctgagttctagtttgattgcactgtggtctgagagatagtttgttataatctctgttcttttacatttgctgaggagagctttacttccaagtatgtggtcaattttggaataggtgtggtgtggtgctgaaaaaaacgtatattctgttgatttggggtggagagttctgtagatgtctattaggtccgcttggtgcagagctgagttcaattcctgggtatccttgttgactttctgtctcgttgatcagtctaatgttgacagtggggtgttacaagtctcccattattaatgtgtgggagtctaattctctttgtaggtcactcaggacttgctttatgaaactgggggctcctgtattgggtgcatatatatttaggatagttagctcttcttgttgaattgatccctttaccattatgtaatggccttctttgtctcttttgatcattgttggtttaaagtctgttttatcagagactaagattgcaacctctgcctttttttgttttccatttgcttggtagatcttcctccatccttttattttgagcctatgtgcaagtagtctgtctttaaccagtctcttatcaatgagcatccagactgctgcaaaacttgagctctgaccaaccacattgtgactcatattgtatatatgtccttttatgcctgggcaggtctgtctgttggatatgttctcgtagaacggacaagcctgttccccctgtcctccgggtcaacaaacttgtcaggtctgttctgggagctcagtggccaccttattattaatatgaagtgtcatggtacattttattgacagtaaagctagatcccgccaccccccaagtttggatgccaagcagagaattcacctctcgcagaggcagcagggactgcatttcttcccagagaatggcaaaccaggaagacactgctttgcctttgaaatagggattgaaaatggggtcatttgccaattctgcaatcataaactaatctgaaatctggtatgctttcttactagttaattgtcttagggacagccagagaaagcattaggggacatatcacttcattcagaccatgggagtctacaggtcagttccaagatacacctgctttttggattggccaaatagaactatgctattggggtttggggtgagaattaggatcccagcctttatcatccccttaaattagactgctgtctcacatccagcttttcaaactttttatagctcaaagcatttgcagatctagggcttcccatgtaggtgcccagttactgccagctgaaggggtatcccctacttccccttttcccttcacatcaaagttgaaaaccccatttttggaaatcatctctctgcactctgggaaaggtgaaactacctaagtcctcatctgcagttcttcctaccacactcggacatctgagtggaagatccctccttaacagcctcacgaccttatgcacccatctcccttagcacaacgttggacaaatctgggctcttatgtcacacaagcccagtaaaggagcttcctaccccttgccatctgaccacaactgcagcattttcccttggatcccctgctggagaggttgcagggctgccccagcctgctccccatgtgtgggaccacccagcccatcctggtggattgactcattggatggaaaaggaaacccatccaagtccttgcacagatcactctggcatctcctacccagcctctctcacagctatgaataaattaaatctgaataaataaatacagatttgcctagaacctttaggagagatccatccatttccaccttttcctcttggacaccaacaaacagacattttcattggtcttgtgccggtctctggcttttcttcttctgtcattaaccctaaatcatcccattcctgtctattcagcatggggctaccttggcccattttggctgctatatcaaaacactttaaagtgcatggcttataaacaacacatttatcgcagctctggaggctgggaagtccaatattaaactgctgatggatctgacatctgatgaaggcctgcttccttttcatagatggcaccctctagctgtgtcttcatgtggtgggaggggcaaggcagttctctggggcctcttctgtaaggacactaatcccattcatgagtcctctaccctcgtgacctaatcacctcctgaagaccccccaccttgtaatagcatcacattggtgattatttttcaacatatggattcttgggtcaagggacaccaaacattcaaaccacgcactgctaccctttgtttcggctgcaaatcctgtggcagcttaaccctgctgtctgctcgcctcattaacatgaacatagacaaggacacatttagctcacccggatggggctgtgcaggcaccgtgccagctgtagcctgagataaagatgtctcattttatcccattccatgagtgccatgatcagaggatccatttcaggagggatttaacactttttagggcagagagaggccagtttcctcttttatggtaaatataatataatcgagccatagcctaggtatgggcaaaaataagaccaagacacaggcagcaattgcagatgacttgttaaaccaaagaaagctcaccgatcacatggctcattcagagggttctggcgtcagtcactcaactccagtgcccatatcacattcctgagagactgcgtgctacaagtatgtagcctctcaggaacactcaggaatgtgatatgggggtactggaattgagggattcctggggtacttagccaaacaagaccacagccacccacaaggggcccatttttcatttacgcctaactactctttgagtccatatggttctaagaacttcagtcccaaatctttttcctcacagaccactgcagtaatcaaagatggatggttgcaagtagtttgaactagggcagggtttgagacagatttaggacatggcaaaatgaacagaacttaggtgttcactcagtcaacatatatatatatattatatatgtatataaaatcccacttgtgagccaagccctgtcctggatggctgggtaaattagggaatacggccacagtggtctctgtcttcattagctttagtgtcagggggaagatggatttgatgtaggtatgtgagcgggggattcagaattacctcctggtttttgttaagttggtgcaaaattgtggtttttgtcattacttttatagtcaatagggtgccgttactaaggcaagaggtggagggaaaggagtttggagctggagctggggctggggctgcgtaactgtcaggaaaacagtgttttgaagtaagaggaagaagcaaagcagcatttcctcactagacgcccctggcacaggtgggtgagtcagagctcaggggaacatcccaggaagctgtgcggcatggctgctcaggagatctgatgggcactctgcgatgtggggagccacgtggcctgcagcagccaggtcaccagaggtgggcatggcgcctccactggtcagcagggtaggcagaaaagaaggcggcgccaagtcgggagtgctgggacaggtcggcgccttccgggcgcgtctgtgtgtccgtccttatgcctgaccgtgtgaccttctgggagaaatggcctcagcttccctttgtagaagaggaatacataattttctctttacccttcacagttcccagttgggacagacccctgtaacctaagacagattaacaggaggaaaacaaaggtttagaaacacatatacatgatgtatacacaggagatagccagagaaatgagagcatctcagagacgtggctttgacttcaggcttgaataccatggtccagggaaacagagaaagaagggtgtggggaaggccagttatgaggagatgcccagataaagcaccttaaaaaagagtaacatttgttatgcaagcttaagtcagtgtcttctagattgatgatagtctctagggattcagtcattcctttatctctggtacagagaggaaccacccttacaaatggagatttcctttgtaaatgtaattttccttacgcaacggtaacttctgttgtcagaggttctgcctgtgtctgtggtttctcaaaataatcagctcaaaatattctttatgcaaaaggggcataccgcaaggtggcatatgctggtgtcccacaactcctgccttctgagtctctcccaggtttccttcttgtccagctcccgtccttgcaggaaagcgaattcgggggagatactttccagccttaggcgggacagtagtgccaagctgaaagcacagaagccagcaccggcactcgttcctggaggcagttttgatgcctcacccgtgctcatgagtcttgggaaggatctgggctaaagatgattaaatttgggagagatgtgatcaaatgcagagatggtaaaatgaaggaaggagagctggggcaagagtacagatgaagaaagtccagagcaggtgggaaagaggagaaggtaccagcaacaaagatggaaagcgagtgaccagaggaggaccagggaaacaggtagagtggagctttgaagccaaacaagggagtgatgagtagtgagcaaggggcctgtgctcctgggagctccggggagagaaaaatgcatggtgggcctgggatatggagcccactgaagagcttagccccaccggattcatgcgtgtggaaacagaagccagtcagagtcagctgagagcgtgggagaaaaggaaatgcaggtggtgagctaaatagctagaaaagtttggctgtgatgctggggaggagtgggcagtttcctctcctgggaagaggaggagtggcattttaagtgaaagttggggagaagtcttgcttcctaataaaagtgaggaaggttcgttctcatgtgtattctaaagctgtatgcttagtttctcatctacgtctcagctctgcgctaggaaaagatgctagggaaagaatgcaaaagacataggtcttgtcccgaggttcttgtctcctccaggaggcatgtaaaggtctctgctgtagggtggagcgacccttgaaaagggccctgcaggacttggaaggaggctgggatgtgcccagtgaggtgaggttctgagaagggaggcagtatctgagctgggttttgacaaagagctaaaaagtctctaggcagaggtacatgagaaggaacagaggggcggggcctcgggatcttctgggaattacaataaatgcccctgggtaccctaactgaaccattttcacaaaggcacctgctctgggcagacactgaggggaagggtggagccccagcgtacgtctgcccccattccttcccccatgaataaaagcccctgttgggggcacagcgatacagactggccctgttgggtttggggcacatgaacactttcagacacccctgaaaccatcccatatagcttagtgggatcagaaaaccctatctctgtgttctgtggggagagggggaggaccagaggaggagaactgtaaaagccagaggggatttatttgaccctcaggaggatttacctgggcatgtgctctgaaagccaagcagtcctggaaggaaaagcaatgaatcatttatgattgttttcactttgtattcattaaaggcctctgcactattattatggaaccttaattggcttggcaccgggcactgcctctcccagcccctgctcctccctttgccatcagaaattcctggagtgagtgggggagaggaccctgtctgcaacaggcagctgggctagaatccaccccgaagatcaaatgaaatgcagtcacttttctttcttctctctgatcatatattaataaatgtatctatcttgttgggttttagctctgctccccacgagctgctccaagctcctgcatctcttagccccctttgcttcctcagcctccagagaactttccatcagctgtccctcgcccagccttgcagacgcggtgacttcacgcgtgacagcgtgcagcctttgttccaagtgccgtgttgggcactccaccagcaacaatatgcgggttacctgatttacttcttttaatacacttcagtgtaattataactgcataaaagagaggacaaattggcaagtaattacaatgttaatttggcaacgttttatcatattgtggaagcgcaatttcctctctaattgtattgggggggacacatttatctgtggttcagcttactgagggattcttgagaatggaaatgaaacacacaagagacagagaaatcagctctcctccccgtaaatattcctttatttatgtgtgttttgcagcctccttaaaaaagctaactaactcgtttattcaggcctaattaatggaatgccacagaatgtgtaattaggctgtgacagattcagctgatggatggctttgcctttggaaaccggaagtacccccagataaaagggctgaacgcttccctttcagaatctcacgggctgtgcgtgcctcaccaccgtccctgctgagaacgcaaccgtggttcctggaaaatgccccagtcctgggtgccaagaggccttcctcactttcctctgtgtgatgtgtatctgcagcctgatcggtgccatggcacagacaccctcagtcatcatcctcatcaggtaagccctcggcacagccccgcctctcctcctttccacctggtgttcatctgcaggcctcctagggaccagagcttcagacaacaggaatctctcgaaccaggtgagctagggccacagcaaggagcgcagcttctctaggctgataggaatcaattatgtttgatagggacctcccaccaagagaagaaggcagggcatgggggagaagacagcactttcatgttctcccagaaatagagcctgcaggcagttttgaaaaggatcctgcattgagccttacaggacgcagcctcgttggaggaaaatgaaagtggcgtcagtgcccagcccccaccaccctgccactgcttagccatatgaccgtgggcattttccccctagacttgctcctgaatctgtaactgggggtgatatgacccatcctgcctgcctcctgcagtggagcaggacccactgagaccatgtgtgtgcaaacacatagagacttgacgggttattgtgcagcagggctcacggcaggtgagcagtgaccattcttgtacaaagaggttgctggagagagccaaccgaaattctattgttacctgtctctggggacctgtcctggggataggtgaagtgcctcaaagaaagatgagccattagtaatattctgagtaacttttatcatttgcagagttacctagatttgtgttggaaacccagaagtgaactaacacataggctgccattcatctgaatcaggggaaggtactctacacaaagactcatcagctgggcatggtggctcatgcctgtaatcccagcactttgggaggccaaggctggaggatcgcttgagcccaggggtttgagaccagcctagccaacatggagaaacctcttctctacaaaaagtagcagggcgtgttggcacatgcttgtaatcccagccacttgggaggctgaggcaggagaattgcttagacccaggaggcggaagttgcagtgagctgaggtcataccaccgcactccagcctgggtgactgacagagcaagactctgtctcagaggggagaaaagacagacttgcctaattgggatgcagttatccaagtgaacagattcaatagcaaaggctggaaataaaagtaggaatgaaacgcatggaagtacccagtgtccatgcacctcacctctactttatccagcttctctctcactttgccaaccacatttcctcatctttattatgaattcccaaggaagaggatttttacaagtactaatgttacctagaacgtcattagcaaggccttgcgaatgtgcagagcattagggtataatagcaaattaccattttatacttactaagtttgaaaaataaattttaaaaattgacacccagtgcttgcaaggctgtggcaaaactgacaaaatcacaaattgctggtggcatgggaaaaggctatcactcctttcaaaaaagcaatatgacagtgtgcgtcaagagccatacaaatattcagacccttttattcagtaaccctaccccttgccatttatcttaaaaaagtactcctttacaagaagaaaaaaagaaagagctcaatgcagacaaatttttattacaacgttaactataatagcagaaaaacctgaattggaatagtgagttaaattatggcactgcagctccatggaataatgaaaattcttaagaatgtgaaagtgtttatgaaatgaactattgaatttaaaactatttagagaagatgattataatatgcatttggacaaaacccatcagatctcatgtataggttttaggtggctgccttatgagtagtttatttttcattattagacgttttcgtgaagttatattgtgatattcatacactaaaggcattggagaagcatgaaaaatgactagtctcttattagcttgccccacgactcctctgcaaaaacccagcctctagacgctgactagtggtgactaccaaacatggaaagtttgttgaaattcttaatcacttccagatctcagcttgataaacagctcttggagctttgctggaaatatttgattccctctaaattaatcagccacagatggcctaaatgacctaggcttgtaactccacgctgtgctggaagcgcatgctatgcattgtgcatattgagaggtccaagacacagttttattccatcaccttcctagtctgatttgccatcacagatgtctcaggctggcacaggggcacagatgtgcaccagcccttgcccctcccagaagaatggacccactgtcatgccaaacaggaccatcccaacaacagtgctcagaacatctggaagcgaggttgaaagctgatgcccagcccctcttaggccccacgctgggctccgagagaaattaggcagtgttctcaaggtcacccagctagtacctttagaactaagactccctcccagcgttgtccagagctttcaatagtgttcacacggagccctccccgtttcttcatgactcaagccaagaaggattcttcttctcataggaagcaatttcccaacaggatatgaagggagatcttagcaccttgctcactttgttcctagtgacatatgatagctgaaaggaaatcaaatttcaggtgataaatattctaactcattataccagtgtgctttcttgataaggagaatttgtctctatttatgtgtctgtctttcaagtcagtgctttcaaatgaaagtgcaaaaaccggagacatggagctgataatagctttgaagaacttggattttgtaacgtgcacgttctaaagggtgctgactgtgtttctgtccagaggcactggactcatcatggatgttgtactggtgtctaactcaaccagccagagtcacgtccccatcgctcaatgaaagtcatgacctgctgccctgggatgacttacctgtactgtctgggtcccaaactgaagaactaggagtccaatgttcgagggcagaaggggtccagcaagggagaaagatgtaggttggaaggctaggcccatctggtcttttcatgtttttctgcctgctttatattctagctgtgctggcagctaattagatggtgcccacccagattgaggctgggtctgcctttcccaccccactgactcactcaaatgttaatctcctgtggcaacaccctcacagacacacccaggatcaatactttgcatccttcaatcaagttgccactcaatattaaccatcacagtgctggaacatgctaagtggattatttcccaaatggtccatccagggtgtctaaccatgctaatctggtggatttcacaaaatgactggagaatggtaaaggtgctcatggtttcagcttgtttgtgaaggataaggggaattattttctcggttgatgttttcccccccatacgtgtaccccacccacttaagatgcttcctgatctcagcaaaaccaacatgtctttaaacgcaggttttatgaccaaatttgcattctgtccttcgaatgacaaggttagctccagttattaaaaaacactgttaaattcctaaacttatcttggcaccacagttgcagttatttttcagactttaggcagaaaaaaaaaaagacactattagtaattttaaaaaagacactattagtaattttctaaagaagagctctgatggacagcagcaaatgactctggggtctgttaattacaggggaatgataaaaatctggttttttttttctcttcatctctttgcacgtaggacagtcagccctgaactcaagtcttacgctttgggagttctttttctcctccttcgtttgttgggtatgtattatctctttatttcctcaataatgaattggatgcttattactaggtgagtaactgtcagtcaaattatcccatttcctaggtctgtctcttttttctttgcagtttaattattagtaaataagaaattttaagtctcaaaattttggtcagagataaactcagacactgcctcgatatcacgaagttctcatttataccaactcttatcttcacgccaccgtgaattctcatcggcataaggaggaaaagagatggcaccaaaggggaaaaaaatctggtggtgtaatttggcatcttcattaagcaagccatgagcagcttgtgaaatgcttcatttatggggccgccagctgggagagagaggcgttctcacaatgccttgaaaatggaaactttgcatcctttaaatttttccaaactgacttagtttgtttaccttgaatttctgggatggggcaaatgtgaccttcatgctatagggcccacgtttccagatttggtatggaaagaaggaagaaagtctgaccctcttgtttttaagataggcaaaaggaagatgagatagtccatggttcaccacccaaggtccttcctgggcactggctgggctgacgctgggcctggttcccagctatgcctacctttctcttgccataccacaccgttgctttatgagcattcttttgttaaggccaagatcaagataacttttttccttgaataataggacagtcaccttccccagtggactttaagtggcatctgaatgtagaaaggaaaacaaccatgacctgtatttttagagtagaaataaaattcctcattccacgtatataatcgtggataagcacaaatacctagctatagaaatgtttgtaaaagtggaaaattggcagcaacccaaaagcccaacagcagacaattagttaaatcagttatggtctataatcgcagtaggatttatgttcccctttaaaattctggaaagaaaaatatagacttagaaagggcatgtgatgggggaaggggaaaaacaggtctgtaatgtaataacttttgcaatatttttccattttatcagaagagtatcagctattatctttgagtaataaggttatattttctaaatttgttttaaagttttgaatgaaatgtctgttacttttatgagattagtttttatataccgatatatgaaagaaaaatattaacctttagatccattaaggtcctccctggggaatggcaaatacatagcatatgtctctcctcaccttccttctccgtctatagcaaaaactttctatcaatctgtgatcattccctctgtgcctggtagaagacctcagaatgctctcaaccactatcaatccatgttccttggtatatacatgggaactcaaatggcattgtcctaagtctaagtcatggaaaagagaagtgctctaggtgtgaagatgccccaattaaaacaagttcagcgctaattcaaagtaaagcatttgggccttcctgggaagctgtagtagcatgcagaaataccaaggcagagttatgatcgtgctgattttttcctatcagtgggagggtgcagtctgcatatattttacccctgctctcactgcagtgtggggtggatcgataggtggatgtgtaatattaactggcacattgacaccctaatttttgcaaatggtaaagccattccacatatgcatttgttcaagaagctaatgtttattgaaaacctattgtgttctaagccatgaaccatccccaggtaagtgacctcagctctgccattacgagtcctctggggctggccagggaaggtaagagcccaccctcctcatctgtggagttgctatggagatctctgcacctctagacagatactaaggactcaatgcaactggcagaacatttttttgatagcacaagatgaaaaacaatttgcaaggtatttctgaaaagttaatgaaaattgtaggatagttgaaagcaaaagtgaacattatgaggcatatgatactgttaaaatcatcatacactgctgtaaagcagtttcaatatctgtatgtctgccccaggaataatcaaccaggtattacctagaatagtgtttttcaacttctgcaactgtaatctagagcaagagatgacaagttttgcattatggcccagtacgcacatgcctatgcctagatacagctgaaacaaacaaaaaaaaaaaatcatgaaaaaatactcactgtaataggtatgacacattctgacattttctattctagtctattacatgcttttaaaaaagttggttgtgacccaccctattgattttattgccccttatgagtctccaattagaggctggaaaaccctgctctagaagactatgacacagcttcatctttcagttgaaagcagctcattgaagaagtcttagcatttggcctaattccctttcttgcaggacccagtaagattaaccaccattattgttaatgtgaaggccggcaaagacatcagatcctgtgacatcatcaacttttttgctggcctagcaagggcaatggggatacaatggggacatcacaggttagtgtgacaagattcgagttggcacaggtgcaacaggaatatgtagaagggcctcctaatcttgccttgggatgggagcagtgggtttggaaaggatgtgatgtctatgctcagccctggggaaggagtaagagtcatacagatgagcagggagaaggacttacggggtaaaagcccggggatgaacaaaggtcccagcatgtttgggggctgcagaaggcccagactggggggaaaggggggacagaagaagatggagctggagagggtagtggatcaggaacttggtcaggaagggcttctgccctgttgctgcatttgacctttatcttgggagggtgaggcagaagaatcccttgaacctgggaagcaaatgaaagttgttgatgggctttaaccagagagtgacaagatccactgtgtattttagaaagggcttgtctgccatgtggagaataagaacatggctgaagaagttgctgctgtaatgaagtgaatgacagaggctcgtgccgagatggtgctcgcaggatggggagaggggtagggttgagaaataaaaggaggaatctgcattatgcattattctccaagtggaagcataagaactggagtcttagaaaggggcacccacagtgcccactcctaagaaagtcttgggtaatgtggtgaacaggggaattatttatgagacaggaagaaaggatgtagagcaagttgggagtggtgtagaccagcgctctccagtggaacgttctgtgatgatggaaatgttctctgtctgtaccacaggtgctgttgcacacttgaaatgtggcttctgtagcctactttaattttattagttttcacataagtaggtggatgtggccagtgtctgccatactggacaatgagggggccatctttgatgcaccaccctcatgggtcagagtgaggaaatgggataggggaacaggaagaccctctttccagacacttgggtgtaagtgaagagggcaggagctagaaatgaatgtgagatcggtctcccttgttgctttacccaccaagagcaaggagttggtagaaagggccagggtagggctgcagaggtgtactggtcagtggggctctgggagtggccccagcaccctggagtagaagcaggagtgtggcaggagagtggagccaaagaagctgagggtgatgatcaaagtagggctgagatgggagaaaggagagaggacaaagatacaggaactgtaaaaactagttgtaataaataatggaaaaagaactggaggatgtggccaaagcctcattgtctgacttcgagattatggaagtggagcagttctgaccaatgacaaagcccagggtgttgctggccagagagggacaggggtcaagagcgtggatgttgagagtgagttaatgaaaggctcacatggacaagtttatgttgttgagtaggggaggaagacactgagctggagaagggtcagtgaattcagagtaaactgaacgatctactcatagcagaattcctggtataattgagtccatcctcctttattcttctgcaggtgtcttggctactccttttctctccaggctgtgggcaaactctctgctcctgagttggtctagaatcttgttcctggggccactgcttgccagggcgttacaccaaattaaattattggaaacatacatgtgctgagactcttccacatccaaggtgctgtctaggggctgctcagggtgcacagataagtaggtgccaatatcctgcctctggcggctccagtaggagaacaaagcaagtgtggggaaggtgtggggttggaagagttacagagggccttgattttcaaagggagaaattatacttggctgagtagttgccagtgtggagcaaatgggggtttcagatgggagagtgaatgtacattcagaattctgctttaggtagagcagcaggtgagcagggcatgaggtttagcaggatgcaggataacccatcaaaagcattgaagtgagaagctgaccaccagcaaagcagtgggtttgaacggtaaagacagatgggagccacataagagacagcatctattgagatccccccaacccaaccgacctaagtgaaagcaaaagagaagcaatgaaagctcaagatgaggctgaggtttggagcccctgggactgaggctatggagaagcctttaatagaataagaaacaatagatcaagtgtctcagggtgtcattagggatgagcttagcttccacaataccactacaaactccccacatacactgaccctgcctcttaattttccagcctgcccgcctagccaaaagcatagggaaggccctcggggtgcatttctgtaggcaggggtcattcctgagcagattgtccttggtctggggtgatttgtgaactactctggaaaagtacatcctagacactcctgctgtggcttgtcagacatttgttgagttcctgctgtgagcatcgtcttgcatatgccaaagtttataggcaagtggaaaaatgaacgtgttaagtgctgctttggaagaagcaagcacagcatgcccaggggccccaggtgagagatgagagggagtgagatacggcggtgggatgcatggaagaccccttccacttgcctacacttttaattgttcattcggcgaacatatgttaggcgccagccatgtgccctggctctgtcagcagtggacctcacctcctgatgtacctgcaccacccatgatctgccacccttacctgtactgagatgacatccagtatttaccatgggccctctaaagtcagtcacacctgctcttgagcctagctctgcctttcctgaccatgtggcagattatttaagctctctgggccttaccaactttaacaaggggtccaggaatgaaaggagaacatagtagctcctgcagactctccagtttaagaaaagtaaatgtcaggtatcactggaaaacagcccagattctttcttggcattgctgaagcagagaactcattaaaccttccaggagaatacacttttcagcatctccctttctagctggtgctggacataacagtaattccaccaggttgaatagagattccatggtgaattcaagtcttggcaggtaagccagagagaaacagatatctttttaaatgtaagtggccgtaattttcagcttccattttgtcccgtaaaggaatttgaacttatttttcttacaaaagcctttcagttcaccttttaagtttagaccaaggaatataaataggcccagccatttcaactaagagagtaaattaaatagccaatatataaggccctgaggtttaatctctgttaatagatttcaggaaaacagagacagtgttcttaaactgtgcagcaatttatgcattgaaatatatatagctgcaatttaagccagagtgtaatagtaagatttagtccttttaatattccctctaatagcgggcaacagcattgagcctgcacataccttcctcagcacagggtgggttcccagtgccccagtgatggaaccctattaacacctgcttcatccacaagttcctgcccagaggacctagggagaagacaagataaaaaaaagagagagaactgctcttgcaggctttggggaagacagcatttcttcaaaagacacagttactaaagaaatacaccaccatcatcaagctcccttgtaactaaggacttaacagagtgaaggtgctcaaaaccagagaggacactaaagtacacctggcccccccccttgtcctcccttctggacacacctgattatcctctaaaacttatgatgatgtggagaaatttttttttttttttttgagaccagtctcagtctgtcacgcaggatggagtgcaatagtgtgatcttggctcactgcaatctctgcctcccaggttcaagcgattctcctgcctcagcctcccgggtacatgtacagaattcttgccagtgggggttattattcactgaatcacagcttgaaaggttttctacaactctttctctagaggtggtgaacttaggacggattttcatttacccaaaagagttcctgaacacggaacaaaagccaaacagcagcaagggaaccagatttttggagcgcccaccctgtgagggctttctcaaatggcatcccattgattctttacaaaagctctgcctgaaggtatgatcgtgcccattgtataaacagtgaaactgagattcactcaagttgtgtgaatcacacagttcccaagtggcggaattagaatccaagatcagctgtctctggttcataaatttgcatttcctcccagtcaccaaaactccagatgtgaactccctgtctgagttcacatcaaagcctaccacgatgacaactccgcgtctcttcctgctgacaaacatagtatctgctattactgcctcaggtgtccagcgaaatactgagtttgtttacaaaataagtctcccagccttctctatgtattagcaaccccagagaaggaagggctgcccgctttgcaaagatcaaaccccctgtgtgtttcaccctctgcacacttcaaaaccaggcttcttcaagccagttacgccaggagcttagcaaaagggtaaataaaatgttctctgtatccctggaaatccccaataagagctctaaagtcttctcaaatcaacaaagtctgaattagaaggaaggagattattgggtttggaattttgaaatatcaaacctggaacaaataatctcactctcagtttatttgtatgtgaaataaggtggggcagggggagtggttatggaggggacgcataatggatgtggagcactctatacagtcctgggtagggggtagttaatgatactacttagcatgacagttgccagtcacactgtcacagtctcccatttgtctatggggaaccagctccttgcagggactgcctgagtttttgtttggtccaactgagtgacgaacatataaggatgtggggctgggcgtgaaaatgagtcaccaaggtggaactcccttctgtgactcatcaggtgagttccagaatggcagaggcctctaacaaaaaagatgcagtccgttcgtctctggtattctccgcacacctgcagtttagggcctgatagctagacctcccctttgggaaagaattttaagtgaataaaaaggaaaagatgaatttgatggaaaagaaagccaatattttcactattcagaagtataaaaggaatctcacaaaggttatacttaaggtactcaacctagagtttattctaaaataccaccccaaatcccctatctaacatgaataaggtggcaaaagttctggttgcatggcaagatcagacccttggcgaaacactcacacacacacctcatttgtgtagtgtttaccttagcccttaccaggcagggtggtattaactccattttaaagatgaagaaacagacattgaaagatcaagtgactttctccaggacttttggcaccttaaaagttctttcatctcagctgggtgcggtggctcacgcctgtaatcccagcactttgggaggctgaggcaggcagatcacaaggtcaagagatcgagaccatcctggccaacatagtgaaaccccgtctctactaaaaatacaaaaattagccgggcgtggtggcaggcacctgtagtcccagctacttgggagactgaggcaggaaaatcacttgagcccaggaggcggaggttgtagtgagccgagatcatgccactgcactccagcctggccacagaacgaaactctgtctcaaaaaaaaaaaaaatttatttcatctctaccacaaatgcactctgaaatattgaacagagcatagcatgaaaaactttggtaggttttttttttttttttggagataggatcccattctgtctcctagcctggaatgcagtggcgtgatcatggctcactgcagcctggaactcctggggtcaagtgatcctcccatcggcctcctgagtacttagctttcaaattgttgtttagaggttttgtcatctggtagtggagcttgacaataggcaagatataattggcatatttatcacatagcagtatgccctacttagaagacaaccaagtattataagaattctcactcaggtacatgaatgagttgcacagtggtattttggggggatattttggttttaacaattattaacgaatttggttcctttatgttgcaaatttcctctgatgtgcttaaaatatgacctggtttgcaccgacctggaatttgtatgcaagtatccatgcattatagagcaagggacacctgtaccctcagttccttccagcagcaaagcatttactagaggtgtcctctctaaccttggctccccgtcaccaggtgttgggtggctagaacaaagtgaaatgacctcaagaaaggtcacaaggagggaggagcatttgggagctaatcacaatataatgattatgccccgtgcagagatagaaaggtgaatggatttgctttgccctgctgtgccacagaaacaggccacattagttccatttatctctaggtccatctgtaatacacactggctccagatcttcattttttacataaataacgtggtgtgtggcttagtttctattatgcggttgccatggcagttcctccagttggctctttcaactggagtgaaatgaaaaaaggcacttgttagggggcagggaaaacacacagggttggtggggaagggctgagacacctgggcagcctttgggatcacagggaatgctacgaatatgcgcttccattcggcaggaccacagcccaacctggcagctggaaagaaggaaacaggttgtgtgggattttgagcttggagcttatttattaaatcgagctgcttgggaagtttaatgagatttcaaccagaaatcttctccggggcttctctttggggtatcaagcagcggaggtgaagagttccaaggagaagtacagaggcacctgggccgagagcctggagctctgccaagctcattagcactcatagggtagcaaagccccgctctcacccgattccaggcatgtcattaaaaccgggggaagggctgcttccttcattaagccttccctctctccccaactgcctttggaggccccacagaatggaggtgctgctgtgcttataatgcacatgctgttattccagcaatcatggatggacttcaggggcctatgaaccccctgagatacaggtttgattttatgggtaggtgcattttgctgggctatgggtctagatctcatcaaaatctcagagggaccttccttaatacaaaatgaaattcagatgctctaggactagctctgcaaggaacactccagacagaggtatagaggccctgggatctcagagttggccacacctagttccagagatcacttcctcctcctgcagtctgtcactgaagatggttggcactttattctggcctcaaggggacagtttttttgaacagttaatttgcattagtgactcatctgtcactttcccatagtacagatgacactctcccccttcactcagaatcacctgggaatgtgaaggtgctgaggactgtgctgcacaccaaatgctctgatttcagtggtctgggatgggacaccctggatgatgattgtcatgggcagccaggtctgataactcggataacagcaggcaaagaaacacagagaggaacagggaacggaagtaaggaaggggaacggttttcatctcatctgccatttttggtgactggttgtaggtaccggaaatgctctaccgtgagggtttcaaaactggttaccaactcattctgagctgggaatattaaatatccaggggaagcgaagttgtcagtatatatgcagatattttccatttaaactatatgtgtatacacacagatgtactcaagtccaatttgtggtgcctgcactcaagagcacaacagccctaaaagcctcaaacagaagaacaccacacacagtatgccggcgctttgcagtttcctctgtagaacaccacacacagtatgccggcgctttgcagtttcctctgtagaacaccacacacagtatgccggcgctttgcagtttcctctgtggaacaccacacacagtatgccggcgctttgcagtttcctctgtggaacaccacacacagtatgccggcgctttgcagtttcctctatggaacaccacacacagtatgccggcgctgtgcagtttcctctatgagactacgctgctttcactgacactaactaagaatgtttctcttcaaggaagaccgtcttggccttctcaggctctcagcagaggatgatgatgataatagcagctgtcattcactttacatggtaaagtgacacagtacacactgttctagatgcttttttttttttttttttttttttgagatggagtcttgctttgttgcccaggctgaagtgcagtggcacgatcttggctcactgctacctctgcctcctgggttcaagcaattcttctgcctcagtctcccaagtagctgggactgcagatgtgcaccaacatgtaccacagtgcaaattccaggttgtctctttagtagagacggggtttcaccatgttggccaggctggtctcaaactcctgatctcaggtgatccacctgcttcagcctcccaaagtgctggaattacaggtgtgagccaccatgccagactgatgctttctatgtgtaaagttagtcttcacagccatctggtgaagactgtagtattatcatcatccccattttgcagatgaggaaactaaggcaggagggcttaaataacttgctcagatttgtaccataataaaaaggcagaactgggacacaaactcatgcgctttgcctcctgagcatgtctttgagccacggagtcagacatatttgcctagcagtgctataagaaaagctaggcagagacaggaacaggggagcactggccaccagatccagaaccttaacattcttttcccggtaacaggcttcatccctccacccctcatcttcggggctggcatcgactccacctgcctgttctggagcacgttctgtggggagcaaggcgcctgcgtcctctacgacaatgtggtctaccgatacctgtatgtcagcatcgccatcgcgctcaaatccttcgccttcatcctgtacaccaccacgtggcagtgcctgaggaaaaactataaacgctacatcaaaaaccacgagggcgggctgagcaccagtgagttctttgcctctactctgaccctagacaacctggggagggaccctgtgcccgcaaaccagacacataggacaaagtttatctataacctggaagaccatgagtggtgtgaaaacatggagtccgttttatagtgactaaaggagggctgaactctgtattagtaatccaagggtcatttttttcttaaaaaaagaaaaaaaggttccaaaaaaaaccaaaactcagtacacacacacaggcacagatgcacacacacgcagacagacacaccgactttgtcctttttctcagcatcagagccagacaggattcagaataaggagagaatgacatcgtgcggcagggtcctggaggccacttgcgcggctgggccacagagtctactttgaaggcacctcatggttttcaggatgctgacagctgcaagcaacaggcactgccaaattcagggaacagtggtggccagcttggaggatggacatttctggatacacatacacatacaaaacagaaaacattttttaaaagaagtttcctaaaataaaaaaaataaaaaaaaaaaacccacaagttgaaaacattgccagattaagcactagtgacacaccccgtgccaccctcttcctccaggtgggggtgggggcgggcgcacaagtcggaggggtggaagcaccactcctctctctgactttcgcaatatgggtcactgtgtagacgactcacccagtctgcatgtggttcaaggccccagagttctctcagtgatgctaatgggtgatccgtgctggagtttgtaattggcacctctcaccagctccatttccatgttcaagactgagggcctgagggggagccaggtggggggccagcacctcccagtggcgggcatccaccttcccccagccccacagagtgacctcaggaagcagtaggcctcgcctggctatgactgacccggctcagagctggtgagacccaacgcagtccaagtcatttgcttacatttgccaaaaacattttgccatttttaaaagaaaaaaatacaatccatatgaatttcaaactgttgtatgtataatcctctaatactatttttaactacttctaaaatctgtgttaacccttcaagtcactaacacagttctctaggccggatttattatgctggttgcttttactttttttctccttttttaatgcaccaaaaatatgtgatacaagggatgcaattaacctattgtaattttcatcattttatcctcattcgaatattctacaaaaacaagaatatacaatgtgttacaagaagaaaaaaaaatgcttcaaaaagagagtgtatatgcagcctgcctttaaaagaatcacatttgagacaacaggggataatgtgatgaattgcaaatttgccttttagcttccttccccatgattcagtgatcactgtcacgggaaacccttttatattcatgcttgacattccaagaggcgttcttttcagcctgtggaggagacactcttagatgtgggtttgtgtgtatgggtgcaacacttccggggataggaaagaagaacagttccctaacacaagctgttaagaagtctgtagcatctctgataacgaatagacccacaagctcctggaagctgtcgtgtgtccaatgcgtgaaaatgtctgtgacattttcagtgttagtcttgaactaaggcccttgtctgtgtgttttgaaggtgggtgaacctcagagaatgaacctgttatgatttggggtaagaatcacgttggaaaacctctcgcaaccagcacactaggccttctacggccatttccgtaaggggacagagcttaggtaaaggcacacactcatacacacacaacaaagggccctgctaacttactcctcatgctgcttcagtgacctttgttcatgtcacattcctggcgctggaaaaaaaactcaaaggttgattggtttgctttttcaccttggacacatttgcattttacccacaaggcaaacaaaagaatcaggaagtaaaaaatggttgggagtgggacaggtatggtactgaatttttaatgaacattgtaaatgaagaggcttgaatgacagcccaaatctagagaaggcactcagcaagaccaaccaaaagaaaagctgtgtcgtggtatggggccaccgtgatcagctacctggggcaggatgcttctgagacaggcctttcaactgcttagtgttagtatgtccttgcttatgaaaatggggacactcatcagtacgttaactactaaaggggagatggttctccaaccactccataaaatatgtatgttctgttgttcctaaggctttgataatatcctgtacagattttggtttagttttgcaaatatattgctaataggtcactcttatagattattgcttggcccttcaaactcagtacacacacactgaggccctttgacctagtgttttatggaactatttgctttgagagaaaaaaaaaagaaagttttttaaactctttgcattttggattttttttcctaagattttaggatgaatgtgaaaaagatgttagaataacaggaagacaactccagggctgagttttatcagcaattgggtataaatttaaagaccgctgttgcaggatggctctgaattctgttgtgtcgtcttttaaaattttaattattctcatatagtaccgaacagaaaactcagtctagttttaatttgccttttgtgctctaaagaagcattgtacatacaacactagatccagcccctcgattatctgtttggtttcaagtgaatgaaaagatttcctggtaagatcattggatttacagaatacaaaaatgtacgggatggaataaacctagaaagtgaatgctagagttctctctcttctgctacaaactcctacaccatctcagctgaacatgcccagggtggatgaaaagtctctctctgctgaaattgacagatctttgtaactcctacgtagagacaaagaaggtttgggttttgttttgttttttgttttgttttgttttgtttttctaccaatatcattccctcctatgaagtaagcacattttgcaaaaatgcctctctaggggacagggtttgctgtcttctctcagctgaggctgtgtgctctcagggaacgctggctctgaggcaccctgggggacagggctccagaaggccacagcatggcatgcgggctttcctcacagctagcgaaggagtggaagcagcctcctctcacggtccccccgaggagcttgctaggaacacttaacaggcaaaataataactggaaagccaggagctcctaaggaatcatttgacagggttgctaacgtcttcctagcaggagggagcgtgcccctccataaaaatcacttccttctcaccatctgatcatggaataactcgctctagtgctgacttttaaagattggttgagtgtcatctgtacattccagtcccccgattccactgccctgtgtccagtaattgccctccagcttcccctcactcacactatggcagggcttcccagcccttacagtcaaaaagcctgcagaaacgttccacacaagggcaaccagctggtccctgggatggtagtcacaccactcttgaggaattttcccaggaaaaagattctcctgtggttgctaatggatattctttcacaccttccagaggaggtcattcactgaggaacatttaaaatggagatagatacatgtactaaaatagaaaaacctccaaggaaaagtagtttctgggtccccgtgtgcctgctgggctggttttcttgccgcctgctgcttccggtcctaggaagtctggtttcttctccacccagccatgcctgccagacctgtgcagtctgctctaagccctgctaggaactccaaaggccctactcagcagtggcaagctatgaaggtcagtgcatagaggtcaatgcatctgatcatacagtcaagaccagaaaaacaggatgagcttctgttgcagttggacggagttacgctatattttattgttgcttgaatattttatttgatttggtttagatgagggaagaaaccatgcagttttttcagtctaacagatggagaatacttcccgctgcctggtgctattcttacctgactatcttgatggcttgggagaaccacatatctggccagaagccagaggaaagtaccagacacatggcaggggcctgctggctccactgggctcacgccattctcctctgattgacctcctctcaaccatgatccatgtttccttttagggaccgttcccccttaggttagaatccacttcaaatatctaagaggtgccaacttttccaagagagggtgctagtgaaattaaatttggcctggaaaattagttcaagacccaaatatagtatttatccattttctaaccttccttccttttttattacacctgctccgcccgacttattccaaactgctactctcacaacagccgcaagaacgtaatcccttacagtaaaccaccctaagtgacagactttggaccccacgcccctagtgtactgtcattgctcaagagtaaattggaatactctctcactggtggaagatgcaaggcagatttttgttcaaatgcctcttatggggcctgttgcctagaacagcatgtggaatccaccctgaatgcatgcagccacccacgcctgcctcatcagtagcttcagcaacccagaatgcttggtcgtcatggcagggacaacatgggttatcaaacctaaaatggaaaattttggaaagcaaagatggccctgtcccttagaaacctgtgactgccatggagacagggacaactcacacttctcagagactatccacattagcatttttctttgcagagtttatttgggcgtgcattgcatgagtttgatatattcaaaacatgtattttttcattcctttacttaaaattttggctatatgccaagccctagatcagatgcaaaagtggaaaagttttggtccctaccctccaagaacccccatttcaatgagctggacagatctgaacacaaacaaaaccaatgggataatagtattaagagctagggtctgtctggggataaggagagccaattcatgatggtggtgagttctgcctcatggcagcaagaatcaggaaggctctggagagtgggtggcctagaaactaagaactaaagagcagtgggtgacttttggggaagcagggtgagaagatgagggcagaattgcccccagagagagcgccaccaaaacattcacaagttttttctctaatgggccaagtagtaaacattttagactttgtgggcctgcagtctgtgttgcaacttctcaactgatgtagtactgtgagatcagccatagacaacaggtgaaccaatgggctatgttccaataaagctttatttacaaagaccgtcggtgactgagggaaggccatcgtgtgctgatctctgttctcttgcacaggcaaggtctcaagcagcactgcatgtttgggggaccctagcggctgagcataggtgaggcagatcccagcacctaagactgctgtagcatgggccagggcatacataggaagggaccctgagctaggtgtctatcagccttaacactcctgaccatgagactcttaattcagatatctcatttccaagaataaagtaagtacccctttgctctcatggttaaaattgaaggcaacattatttttctcttgtgtgacgtggcggatttgaactgtatagtctacattcccatatagctgtgacactgtagctcgactagagttaccatcctttttctcttaaatgatggaaatgggcacatgagggagaaatgttcaaactagaaaaagaagagtgattccagataccaaagagtattttccaatccttttcctccccacaaccaacacaaaacactggcaccctaaagttaacagatatgccaggtaaaatacttggtaagcactaataatagtagctaacatttctcaagcactgactatgaaccagctgctggctgagcttatttcatgtattagctcatgtaatctcaaccataaccctgtgaggtaggagctgttattggcttcattttacaggggaagaaaatgagactcggaaggtccagaattggctcaaattcacaaagcagagttgggattcaaacccaggtctgtgaaaaagcttttaggtctttaaaagctctccttattcccagacagacccataaccactatgggtactacctccctaccaggtaagacacgagggacctccctccccacctttagacactgatcaagaagaccctggcccgagtggactgtggggccccacatgctcccacgtgcctcctgatgtaacaaccaggacaccatggcagctgggctctggggctgtgtgtccttctaacccctgatcccagtggtccattgatgtgaagtattttacctgaaacagacagataagaggaatcagataggagactcctagtgcattccgaaatgcactatcaaagcaccaagatgccagggaggcactccacagtgctggtcatcggctcccccggaaagaccccagatacctgccatgcctggcacccctgtagtctacagcatcaaccacaggagatcagctctgaccccagggcttcaaacacaccgaagctggtccctaattggatatacttcctctccagaggagaccaggggcacttgtcatattgagttcaagtccctggtcaaactcatgcactggccaccctagcttgctgttctgtcttctgttctcagattccaggcttttaggaacagaatatccagacatttccatttttgtaatagtgactcaggtcaacaatcaggagttggtgattatcataaattttgaatttttgtcccgtaagatacaattgattacgttcttttgctatgagcaaatgaacaacatagtaagttttctggaagtttaactttctgtaggtggacacttaccatcccattcatgtttttcttaacgttaaccttatagaagattctcacactaaccttatagaagattgctctcatggagacatgtttggcaagaccatttgattttataatctaaggccataaaatgaattggaagcatagaatttacaaaatgttctacagaaggatcccaactgaacacagatggtgctcccatccagcactgtaagggagggaaggggccaggaagctcatgtttttattaagcacctgctacccacgtgccgggttctgtgaattcatgatcccaggtactgctcccagcagccttctcacaccagccctacgaggtaagtatatattcttttccacttcacaggtctgaaaactaaagctcagcaaatccaaccgttctaagatcacatagctagtttataaagccaccaggagccagtgacagatctgactcctaaaccagtgctctttccactacaacacaaagcccccgaagttagaacacggaactagcttcttatgaagcctctgcaaagccaacagagcgtctacctgtgggaaacccctagcaggagtctattgtttcatagagaagtgagccaggagttggaggtgagaatctctgcaaagttttgcctatgggcacaggaatctaggtttcactttaataattaaatgttggaaacctttcaaaacactcctccttcctacttcaaccttagccacatcagcaggaacttcccagccattcatcagcctttatcttattcattctgctgagcagggatgaaccccagctctctcacttcggtcccacccttcccaactccccacgcccaagtctttcagtggaacccaagactgtaagaacgtaggccttgtgagagtgaaggaaggatgctcgaacttgcccaggactcaggcttcagcttcacaatcccgaggaaaggaatgacatttccaaactgtcacctttgtagcgctgggtcaaagtctaaagaggacaaataaatagagacttctgtggcctcgttgtgcctattgaacaggagagctgcatgtcacaatcaatgagacctgcacagcttgtgaatcatcactgagactagttgtgtttttaatacctttaaaatgaagccacagcatctattctggaaatgtggcgtaggcttaaaaaccttgctccaaagaggatatcgtttcagccagcatgcagtgaatatctgtggctacacaaaaaaacaaactgtcccgaatgctggaggaggaaatatgacattgtgatgccaggcagttttctgtgacactcaggaatctcttcaatagagatgtacagtgacacttagagccccagaacacaaggtctgtcactagtaatttacataagataaggataaattattgactgggatacatcttactcatccccgacatctgcttggctgtggggttggtcatgtagataaatatccttcccagaaaggatatttggccttcaaaaaagtctctgggctcagagtctggtcccttggggttacatggaatgaaacccagcactttattgctttgactgcctactcttgtcccttcactgcaaagccatcatgctattaaataagcctaacaaacagtaggtgaagcagaaaagaccgatctctttttcctcttggctcttcttccctcctccccctttaggcacagagtaccaagacattgagactgagaaaacctgccccgaatcacattcaccttcagaagactcctttgtgagaagctgagggcctggccctcttcctcttcctggagagaacagcccaccaccacccacagacctcgcgggcctcacttagcgcgctcctccctgtccgagaacccgagggtccccatgtggattatccagccagtgtgtggtcctttgaggccccaagcgcaggcctgtgatgaggaccaaagaggtgacttatggtcaggagtactccaaacagctctcagagtaggcatctttcctgggtctctaaagagtcatgctgacctggtgtgcaaattcccttccacccatccctctacctcctctggggatggcttgccgacatgctttagaaactcccctcttgggaatgctcctctgactgagggctccaacagctttaatgaaatcagccgagagggtaaaaaccaacctgttgcatagaatggaggggggaaaaagcacatactcaatagatttttgagtgtggtactctgtatttttgcagcgtttattttccaaatgagcagtttagaaatatgtgatgtaaagtacatactgtacgtttgctgaaaattatattaaaagcactattttaattcttcctctgtctcatgctctaatctctgttatctttcttgtgccttcaggtagaatgattctaaaagattctggagagtgtttctggctatgtgcgttctatatttatgggctttgaggttatggacttaagagagtatgagctttagagccaagagagacctgaactcaaatccctaccccactgttggtgtgatgttaatgtagtgatctgactcctcttagcccccgttttaccatttgtaaaatgagaatattaatgcctactttatgcaactatggtaagacttaaattagatcatgtgtaaaggtaccaagtgcaacatacagcacagaaattgtcattgttcattactaccccaacctctggctggaatctaaatgctccataccatgcagcttctactggtaacatttagtggtcctatcctctcactgtctggttttcatttctgattctcccactgcctgtaaagcctaggagacaggcaattggcttcatctcacaaaagccccagtgcatgtatagtgtatagtgcccaggtacagtgcatgttcttccgtgggtgatcaatatgcaaatgaatgaatgatgaacaaacagcctcagacccagtcccattccctcagtggaaactacagcatttgcctccctttctgtaggtccacaagctacccagtggctagagctctagtggctttcccataccttgctaggtctcttcgtaattggctggcctcacctctgtatctttattaattcactggctggactccaacctcatatgagcagataggttgggttgacacctgccactgacttgcagaatggaatccccactgcattactccactggccagactggagctcaggcatggatgcttgccagaattctatctgtgctttgtcttttgggcaaagcacttagaatccacttgtcttatggggctagccccataactgaccacttttcttcatagtcctctccatcctgaatcttgtcctctgtagcccatcatccactgcagctgagttcaccccaaatcaaagcttgtcaaatctattattacctgaagactgcacccacctcagccttgagttgtcttttcactctgaggttttagggggtcaggaaacaatgtgcttgactttcttcaaggtccaattataggccattggtgccttggaggatcctttttcagcctggctgtgttatgtgattgtttattttttgcaaagcaacatgatttattctctccagtataaaaatcccaagaaaatgcaatttcaacattctctgtcctgatgttaaaagaggctgaagcagctgtaaaagttgttagcggttcctcctgggcttcacctgcaccagaaattgagatggaggcagaagggaaaggagtaaggaaaggctagtgcttaaggtatccgtgtgttcagtcccacattttacatctgtttttatctatagtccagtttattttccctggctaccattcccccatacaggtggtcagcttaaagaaaacttattctctccattttatctcagccttgcaaagacatattcttatagtcaagagattcatctttcaatacttaagtgaattcatgagaaatctgtccataaaagctgtccaactattaataactcagagagaatacacggcttcatcagaccccaaaatgccccctcttcccaatgtcctctcagttgccatgggccaccagggccttgaactacatacacaactagctcatcttccacgcttgaaagtccaactcgacctctttcccagtcttcaggaaagggttagccatgcactcaagcatttggctcaaccaaaacaacagcaggctgtttctgtggccccataacatggattcagaatcactcatacatcccctttacaaagagctttctgtcttctttttaggctttgttacttaacgagctactgttatggaacagcttccataactcttgagacaagtgtctacacttaatgcacaaggcagactcacttgctttcctggaagcctttaaaaagtctcttaaccttcttgagttatagcatttccagttataaaatacatgaacatgtatttatgggatccccaaaggagggcacttcagatcttccagaatcctgctcctctgttgctcataaaattaaggggtgaagtaaagaagacagaacagcaagctagggtggccagtgtatgagtttgaccagggacttcaactcaatatgacaggtgcccctggtctccttcagagatgaagtattatcctgtgaggcctctctacatcacacatcactgaggtcttgaccacaggacacagatgcaactgaaacatgctgccaatgagaaagaagtggaagacccctgtccccagactctacacccctcagcttggcagctggctcctttcttcattcagaagcttaccttgccctctatcttatgcttccatttctgtggacaatcattctgtattgaggcaactatattttcatagtaaaaattagtgcttgatataagtttaaaaaaaaaaacagcccaaagaaaatgacaattcttttccattgtttctaaaatcatcattttctagcccttcaagttttgtgcaaatgactagacatgacaatgcaatactacaaaaggagatgttccttttcagcaggatgttggaaataagattttatttccagttcatctgtgcctgagaatgtgactcttgaagggtcacattactgccaattattttctcaggtggtgtcagtggattggtcctgacaaagtcactgaggcagctactggggaggagaatgcagagtgaagacccgtgctgggtgaggagggagctgaatgcacatgaggaggcctcactgcgacctggtcttaccctccacttcctgcatcccatgctccctgggaagatagaccctgaggaagatggttagtttcattccatatttcaaatggatagatgtcagattaaagcaaggccgtgacttttagcaagtgagtatggacaggactccatgaagtcctctgcacacagtggccacttcataactgggggccataggagagcaagatgacttaggggaggggtcctcaacactcccggccacagactggtacccgttggtggccttttaagaaccaggccacacaggaggagatgagtggcaggcaagcgagcattaccgcctcagcgctgtctcctgtgagatcagcggtggcagcattagagtctcataggagcatggaccctgttgtgaaccgtatatgcgagggatctaggttgcattccttttgagactctaatgcctgagaatagttttatcatgaaaccatctctacacctcccacccccactctctccatccatggaaaaattgtcttccatgaaaccagaaaggttagggaccgctggcataggggaaagagcaggtaacaggtttacatcccggcggttcagccacttttcagcctcgccaggttagcaagtcaagattcgctctaaaccagtctttatgtagctataaaatgggaaggttacagctgcctgcttggcagagacatcatgagaattcaatgtacatgtacagcccagtgtcagtccccggcaagtctcaggaagtcatgagtttcattgagaagtctcatttttggccatataaatacaaaaccacttctatttgccaatatttgttaccactctgctcttcggtaatcctctgtcctgctgagtagtgactctcttgatgagttctcagtccattccttaattttttagtcatttctacttattaaaagagctttgcttcactcattaagatccagtcctgaccatttgagaacttcatcctcatataccttttaacccccacaatggcaggcctggcctgtggcttggggggcctatagtggaggaggaagtgtggtctaccctctcctaccccttttctcttccctgccccaactgggctccagatggaggtgtgggagctgaagagggaagtgaggtacattcagcagactgcctgtggctaagcttgctgccatcactgacaaccactactgatgcagctccgtctctcaagtacgtttggaggcaggcaggcaggctccagtaagcctagctgaaggagaaaaccatccaacagctcccttcagctctggggctcccttttgagaggcagctccaactcccagcaaactctcagttgcccgctgtgagctccaccccccttcagtaagcacccttttcccctgcatggattagtctcagggaagcccatagcctaacctcatcttttccttttagcttgaactctaggatggaagtattagcagggctcttattccccactatgagtaacagatagcttccaagggctgtccctgcctccctcctccatggtcccatctttccagtgtactccccacacctcttctcagtctgctctggtagcaacaagacatgttggcaagtccacatgctgggaggacacacaaccagtgtgcatacccccaaactctatgagcaactgctttgagaacacccttcccaaacagtgccttgcttcagaaacattactcttctcacccaaaaaggtgacctctcatgctcttctccagccctttgtgtgttttgggaatgggtgcatatagggtgggtgcaaggagttggtagtgtgagtttttccaaaaggagaaaactcaaaagatcctcaccccacacaccacaccaccacactatacaaatatggaaagaggaaggccagccaacaggtgacaataatgagagatgatactacctcccaaattttcataatgaaaacccaccctacacctgagccttcaacctgagtcttctaacctccaggtaggtatgtctttgtagatttcacacttaatcaaagagtactggttcaaagcctggtatggagccctgtatcctctaaggacgtgtagagagatccaaggagaacctgtactcaaactttcaatgtagattgaggcaagacaagaacccacataatacaaagaccgctatcagagccctgtctattcaagggctcctactgagcagtaagtacatgacagtgatgggcatttggagcggagagaagccctatgacctgaaatagccagaggaagctttctgaagaacttggagcgtgcaaagacctcaaaggaaatatttgtcatttaggcttcaggtacaatgctttgccctgctcataacaataggtttctgaaaggaggcagggcagtggttagagaagaaaaatgtctatgaatagacactaggataacaacaacgtaccaggtgccgggcgaaattctttacaaaactgtctcctcgtctaatccttgcaagccccctgtgaaataggaatcatttcataccagccccttagctggggtttgagtctcagttcctctacttgccgtctgtatgacctcagtttcctcatcaataatatgaggataatcatactcactccataagaagattgtgaggattcagcaagatgatgattctaaatcacttagtactgtacctggcccctagaaaatatccaagaaatataagggctcctcttctacttcagcacatagaaaacacattctctcacatttccaggtcatctaacagagtgttaaatttttaacagagctaacttggatgggtaaataattgtaacagcaattatctccctgagggcaattatttgccatcaccatttgcacccaccgaaattatatccacaagaaacagagtcacccattagcagataaacgtaattaaattggaagaatgacatccaatggctgactggattaataaaagaaatttattccctagaggtatttcagaaatgcttctccaagctggatcttattttttaaaagcttgtactctgaattcaaattatgtattaattcttttccaaaaatcagcacacctctagcccttataaataccatgtatttctgagaagctttgactacagtggttttataaaccacacacacagacacaaatcctcttgatctttgtataaaactacatatataaaagacatcatactttgtggtaacgtcgattcggcaaatattttgactggattgtatgttttctggtttcagaattttatttcaaacagtaggcaaagaccacggtatatgttgtcacctcacacatttaaacaattttttgcccttaaaccctccaagaataatcatatgcagatctggctcaaaataccttgaaaaagtgagtttataaactattataatttctcatgaattccacaacaaactattaataataagcagactccaaatttatggatcctgataagggatttttccttttccttttgggacatccgacactctcattgttcttaggaacacgggtctaagtcttcattcctaaatctgtctactgttgtcacttcgaaagcctcaagataattggtatccgctagttacatgaatttttatgcagctctccgtctgagatttggtggcagtctacattggcatacttcttaggttcttgaaatacttctgtgaggtagagataagaaagccataaaactttattttactaccggaaaaaatcccaaagaggaaaggtgtctttccctgtagctcttactttgctcctgtcacaaaagaaagtaaaaccatctgtcccaagatggctgccagagaactacacaagctgttactggcctggaagagcatttcaatcacttctacattttcattcagaaaaaatgaattttcatacaaagtgattgcagaagtaaaaatgggtgcattcaatatccactctgcacttgacatgctctcagagtctagaccatggctagctttgagaatttcaagttgcattgaaatgtgcccttacagcaaatcacattcattaataatctaacccaattagactacaactgaaatacagccaaattgctaccctcttcaactctttggaagaccattgaatgatctttctaaatatttaaccaaaattaaaatgtttggtattagaaagtttcttgtgttgtctttttttttttttaaatataaggtcatcttttctaagactagtataaatggatcttagttgttacatagttggtagctgtgtgtataaattagcaaatgtggtgtagcaatgttctctacttccctgcctgtataggctcagatctgtggacatggccttatttgcacaattctgcacatccttctgtggcatactgggtgtagacaaagttctgttccttgagtactgatgaatataaatttcctacctgctttttgcttttcaaaaaaaaaaaaaaacgtggctacagaaaagaccatacctagccctgttcatttacaaagatttcatacttggttacaatctcaacagtgataatggtttcattcatgatagcacacataaaaaagcatggtaataaacctatcagaaatatgcactatttacttttttaaatagtaaaactatcctaaaaaacaaaagtaataacttgaaaagtaaagacaattaccatattcctagatcggatagttaaaacctggaaaaatgtgatttctcccaaatgaatctataatttccatgcaatccccaagaaaatctcaataagagtttctatggaaattcatgaactgaatgcaaaattcaaatataagagctcaagcatagccatggtaattctgaaaataaaaataaaaatgaatgaggattgcccttctcaaaaatcaatatattaataaagcaatagtgcagttgacccctgaacaacatggctttgaaccgtaagggtccacttaaatgcgtttttttccaaccaaattccacatcaaaaatatagtattcttgggatgctgtattagcctgttcccatgctgctaataaagacatgccctagactgggtaatttataaaataaagcgctttaatagactcatagttccacatggttggggaggcctcacaatcatggcagaaggtgaatgagaagcaaagtcacatcttacatggtggcaggccagagagcttgtgtaggggaactcccatttatagagacttattcactaccacaagaacagtatggagaaaatcgcccccatgattcagttatctccacctgtccccacccttgacacttgggagttattacaattcaaggtgagatttgggtgggaacaaaaccaagtcacatcagatgtgaaacccaccctatggagggccgacatatcctgtaggttctgtagggctgactgtaggacttgagtatgtgtgggggtcctgggcccaatcccccatgtaaaccaacgaacaactatacttaaaactagatccaagcacagtggctcatgcctgtaatcccagcaatttggggtctgagatgggaggatcagcttgaagacaggaattcaactctagcctgggcaacacactgagaccccgtctctacaaaaaaaaaaaaaaaaaaaaattagctaggcatagtggtgcacacctataaggccagctactcaggaggctgaggtgggggaattgctcaagcccaggagtttaaggctgcagtgagctatggtcgcaccactgcactatagtctgtgtgtcaaagcaagaccagcattcatacaggaccagaagataggtcaaagactcagaatagcaacaaacacatttatatatgtgtgtgacttagaatatattaattaaaggggaatattttagattgctgggaaaactgactattcgattaatggtttggagagacaacttagaaacaaatttgattcattcccagtcaccagtgaaaaatataaatcttacgtgatttacatagctaaaagtgtttagaagctataaagattcaggaaaaacaagagaatatattcatggttttgtggttttctaaaaagacctaaaataaaaaaaaaaatccataaataaaaagacatagttttgtttacttcaaagttaaaatatctatataatctacaacagcatgtataaaatcaagagaatatttgatttataaattacaaaaaaaaactgtcaatatataaagaatctctacatatcaacaagaaaaagtggaactagagctactatatcacgtatttcaggctgccactcccattgtcctctctgtaaatcctaccgaaaaccacacaaataataccaatgggcacagcacaagagaggggccacaaatgtcctttaagtattcaaactcactaataatgaaggaaatacaaattttaaagagataattttttacctaaaactttcggttaaaattttagattaataatatctccagtcagggtacaaggcaaatgctggagtcttacatggcggcaggccagagagctt

SEQ ID NO: 1040 - DNA, 2429 bp, Homo sapiens
gatcttcctggtgtccgagtgcgccctgatgctggcgcagggcacggtgggcgcctacctggtgagcgtcctgaccaccctggagcgtaggttcaacctgcagagcgctgacgtgggtgtgatcgctagcagcttcgagatcgggaacctggcgctcatcctcttcgtgagctacttcggggcacgcgggcaccggccgcgcctgatcggctgcggcggcatcgtcatggcgctgggcgcgctgctgtcggcgctgcccgagttcctgacccaccagtacaagtacgaggcgggcgagatccgctggggcgccgagggccgcgacgtctgcgcagccaacggctcgggcggcgacgaggggcccgaccccgacctcatctgccgcaaccggacggctaccaacatgatgtacttgctgctcattggggcccaggtgctcctgggcatcggtgctacccctgtgcagcccctgggcgtctcctacatcgacgaccacgtgcggaggaaggactcctcgctctatataggaatcctgttcacgatgctggtatttggaccagcctgcgggtttatcctgggctctttctgtaccaaaatctacgtggatgcggtcttcattgacacaagtaacctggacatcactccggacgacccccgctggatcggagcctggtggggtggctttctgctctgcggtgccttactcttcttctcttccctcttgatgtttgggtttccacagtccctgcccccgcactcagaccccgccatggaaagcgagcaggccatgctctccgaaagagaatacgagagacccaagcccagcaacggggtcctgaggcaccccctggagccagacagcagtgcctcctgtttccagcagctgagagtgatcccgaaggtcaccaagcacctgctctcaaaccctgtgttcacctgcatcatcctggccgcctgcatggagattgcagtggtggctggcttcgctgcctttttggggaagtacctggagcagcagtttaacctcaccacctcttctgccaaccagctgcttgggatgactgcgatcccgtgtgcttgtctgggtatcttcctgggaggtcttttggtgaagaagctcagcctgtctgccctgggggccattcggatggccatgctcgtcaacctggtgtccactgcttgctacgtctccttcctcttcctgggctgcgacactggccctgtggctggggttactgttccctatggaaacagcacagcacctggctcagccctggacccctactcgccctgcaataataactgtgaatgccaaaccgattccttcactccagtgtgtggggcagatggcatcacctacctgtctgcctgctttgctggctgcaacagcacgaatctcacgggctgtgcgtgcctcaccaccgtccctgctgagaacgcaaccgtggttcctggaaaatgccccagtcctgggtgccaagaggccttcctcactttcctctgtgtgatgtgtatctgcagcctgatcggtgccatggcacagacaccctcagtcatcatcctcatcaggacagtcagccctgaactcaagtcttacgctttgggagttctttttctcctccttcgtttgttgggcttcatccctccacccctcatcttcggggctggcatcgactccacctgcctgttctggagcacgttctgtggggagcaaggcgcctgcgtcctctacgacaatgtggtctaccgatacctgtatgtcagcatcgccatcgcgctcaaatccttcgccttcatcctgtacaccaccacgtggcagtgcctgaggaaaaactataaacgctacatcaaaaaccacgagggcgggctgagcaccagtgagttctttgcctctactctgaccctagacaacctggggagggaccctgtgcccgcaaaccagacacataggacaaagtttatctataacctggaagaccatgagtggtgtgaaaacatggagtccgttttatagtgactaaaggagggctgaactctgtattagtaatccaagggtcatttttttcttaaaaaaagaaaaaaaggttccaaaaaaaaccaaaactcagtacacacacacaggcacagatgcacacacacgcagacagacacaccgactttgtcctttttctcagcatcagagccagacaggattcagaataaggagagaatgacatcgtgcggcagggtcctggaggccacttgcgcggctgggccacagagtctactttgaaggcacctcatggttttcaggatgctgacagctgcaagcaacaggcactgccaaattcagggaacagtggtggccagcttggaggatggacatttctggatacacatacacatacaaaacagaaaacattttttaaaagaagtttcctaaaataaaa

SEQ ID NO: 1041 - protein, 655 aa, Homo sapiens
MLAQGTVGAYLVSVLTTLERRFNLQSADVGVIASSFEIGNLALILFVSYFGRHRPRLIGCGGIVMALGALLSALPEFLTHQYKYEAGEIRWGAEGRDVCAANGSGGDEGPDPDLICRNRTATNMMYLLLIGAQVLLGIGATPVQPLGVSYIDDHVRRKDSSLYIGILFTMLVFGPACGFILGSFCTKIYVDAVFIDTSNLDITPDDPRWIGAWWGGFLLCGALLFFSSLLMFGFPQSLPPHSDPAMESEQAMLSEYERPKPSNGVLRHPLEPDSSASCFQQLRVIPKVTKHLLSNPVFTCIILAACMEIAVVAGFAAFLGKYLEQQFNLTTSSANQLLGMTAIPCACLGIFLGGLLVKKLSLSALGAIRMAMLVNLVSTACYVSFLFLGCDTGPVAGVTVPYGNSTAPGSALDPYSPCNNNCECQTDSFTPVCGADGITYLSACFAGCNSTNLTGCACLTTVPAENATVVPGKCPSPGCQEAFLTFLCVMCICSLIGAMAQTPSVIILIRTVSPELKSYALGVLFLLLRLLGFIPPPLIFGAGIDSTCLFWSTFCGEQGACVLYDNVVYRYLYVSIAIALKSFAFILYTTTWQCLRKNYKRYIKNHEGGLSTSEFFASTLTLDNLGRDPVPANQTTKFIYNLEDHEWCENMESVL

SEQ ID NO: 1042 - DNA, 1969 bp, Homo sapiens
gatcttcctggtgtccgagtgcgccctgatgctggcgcagggcacggtgggcgcctacctggtgagcgtcctgaccaccctggagcgtaggttcaacctgcagagcgctgacgtgggtgtgatcgctagcagcttcgagatcgggaacctggcgctcatcctcttcgtgagctacttcggggcacgcgggcaccggccgcgcctgatcggctgcggcggcatcgtcatggcgctgggcgcgctgctgtcggcgctgcccgagttcctgacccaccagtacaagtacgaggcgggcgagatccgctggggcgccgagggccgcgacgtctgcgcagccaacggctcgggcggcgacgaggggcccgaccccgacctcatctgccgcaaccggacggctaccaacatgatgtacttgctgctcattggggcccaggtgctcctgggcatcggtgctacccctgtgcagcccctgggcgtctcctacatcgacgaccacgtgcggaggaaggactcctcgctctatataggaatcctgttcacgatgctggtatttggaccagcctgcgggtttatcctgggctctttctgtaccaaaatctacgtggatgcggtcttcattgacacaagtaacctggacatcactccggacgacccccgctggatcggagcctggtggggtggctttctgctctgcggtgccttactcttcttctcttccctcttgatgtttgggtttccacagtccctgcccccgcactcagaccccgccatggaaagcgagcaggccatgctctccgaaagagaatacgagagacccaagcccagcaacggggtcctgaggcaccccctggagccagacagcagtgcctcctgtttccagcagctgagagtgatcccgaaggtcaccaagcacctgctctcaaaccctgtgttcacctgcatcatcctggccgcctgcatggagattgcagtggtggctggcttcgctgcctttttggggaagtacctggagcagcagtttaacctcaccacctcttctgccaaccagctgcttgggatgactgcgatcccgtgtgcttgtctgggtatcttcctgggaggtcttttggtgaagaagctcagcctgtctgccctgggggccattcggatggccatgctcgtcaacctggtgtccactgcttgctacgtctccttcctcttcctgggctgcgacactggccctgtggctggggttactgttccctatggaaacagcacagcacctggctcagccctggacccctactcgccctgcaataataactgtgaatgccaaaccgattccttcactccagtgtgtggggcagatggcatcacctacctgtctgcctgctttgctggctgcaacagcacgaatctcacgggctgtgcgtgcctcaccaccgtccctgctgagaacgcaaccgtggttcctggaaaatgccccagtcctgggtgccaagaggccttcctcactttcctctgtgtgatgtgtatctgcagcctgatcggtgccatggcacagacaccctcagtcatcatcctcatcaggacagtcagccctgaactcaagtcttacgctttgggagttctttttctcctccttcgtttgttgggcttcatccctccacccctcatcttcggggctggcatcgactccacctgcctgttctggagcacgttctgtggggagcaaggcgcctgcgtcctctacgacaatgtggtctaccgatacctgtatgtcagcatcgccatcgcgctcaaatccttcgccttcatcctgtacaccaccacgtggcagtgcctgaggaaaaactataaacgctacatcaaaaaccacgagggcgggctgagcaccagcacagagtaccaagacattgagactgagaaaacctgccccgaatcacattcaccttcagaagactcctttgtgagaagctgagggcctggc

SEQ ID NO: 1043 - protein, 639 aa, Homo sapiens
MLAQGTVGAYLVSVLTTLERRFNLQSADVGVIASSFEIGNLALILFVSYFGRHRPRLIGCGGIVMALGALLSALPEFLTHQYKYEAGEIRWGAEGRDVCAANGSGGDEGPDPDLICRNRTATNMMYLLLIGAQVLLGIGATPVQPLGVSYIDDHVRRKDSSLYIGILFTMLVFGPACGFILGSFCTKIYVDAVFIDTSNLDITPDDPRWIGAWWGGFLLCGALLFFSSLLMFGFPQSLPPHSDPAMESEQAMLSEYERPKPSNGVLRHPLEPDSSASCFQQLRVIPKVTKHLLSNPVFTCIILAACMEIAVVAGFAAFLGKYLEQQFNLTTSSANQLLGMTAIPCACLGIFLGGLLVKKLSLSALGAIRMAMLVNLVSTACYVSFLFLGCDTGPVAGVTVPYGNSTAPGSALDPYSPCNNNCECQTDSFTPVCGADGITYLSACFAGCNSTNLTGCACLTTVPAENATVVPGKCPSPGCQEAFLTFLCVMCICSLIGAMAQTPSVIILIRTVSPELKSYALGVLFLLLRLLGFIPPPLIFGAGIDSTCLFWSTFCGEQGACVLYDNVVYRYLYVSIAIALKSFAFILYTTTWQCLRKNYKRYIKNHEGGLSTSTEYQDIETEKTCPESHSPSEDSFVRS

SEQ ID NO: 1044 - DNA, 2431 bp, Homo sapiens
  misc_feature (1)...(2431): n = A,T,C or G
nngatcttcctggtgtccgagtgcgccctgatgctggcgcagggcacggtgggcgcctacctggtgagcgtcctgaccaccctggagcgtaggttcaacctgcagagcgctgacgtgggtgtgatcgctagcagcttcgagatcgggaacctggcgctcatcctcttcgtgagctacttcggggcacgcgggcaccggccgcgcctgatcggctgcggcggcatcgtcatggcgctgggcgcgctgctgtcggcgctgcccgagttcctgacccaccagtacaagtacgaggcgggcgagatccgctggggcgccgagggccgcgacgtctgcgcagccaacggctcgggcggcgacgaggggcccgaccccgacctcatctgccgcaaccggacggctaccaacatgatgtacttgctgctcattggggcccaggtgctcctgggcatcggtgctacccctgtgcagcccctgggcgtctcctacatcgacgaccacgtgcggaggaaggactcctcgctctatataggaatcctgttcacgatgctggtatttggaccagcctgcgggtttatcctgggctctttctgtaccaaaatctacgtggatgcggtcttcattgacacaagtaacctggacatcactccggacgacccccgctggatcggagcctggtggggtggctttctgctctgcggtgccttactcttcttctcttccctcttgatgtttgggtttccacagtccctgcccccgcactcagaccccgccatggaaagcgagcaggccatgctctccgaaagagaatacgagagacccaagcccagcaacggggtcctgaggcaccccctggagccagacagcagtgcctcctgtttccagcagctgagagtgatcccgaaggtcaccaagcacctgctctcaaaccctgtgttcacctgcatcatcctggccgcctgcatggagattgcagtggtggctggcttcgctgcctttttggggaagtacctggagcagcagtttaacctcaccacctcttctgccaaccagctgcttgggatgactgcgatcccgtgtgcttgtctgggtatcttcctgggaggtcttttggtgaagaagctcagcctgtctgccctgggggccattcggatggccatgctcgtcaacctggtgtccactgcttgctacgtctccttcctcttcctgggctgcgacactggccctgtggctggggttactgttccctatggaaacagcacagcacctggctcagccctggacccctactcgccctgcaataataactgtgaatgccaaaccgattccttcactccagtgtgtggggcagatggcatcacctacctgtctgcctgctttgctggctgcaacagcacgaatctcacgggctgtgcgtgcctcaccaccgtccctgctgagaacgcaaccgtggttcctggaaaatgccccagtcctgggtgccaagaggccttcctcactttcctctgtgtgatgtgtatctgcagcctgatcggtgccatggcacagacaccctcagtcatcatcctcatcaggacagtcagccctgaactcaagtcttacgctttgggagttctttttctcctccttcgtttgttgggcttcatccctccacccctcatcttcggggctggcatcgactccacctgcctgttctggagcacgttctgtggggagcaaggcgcctgcgtcctctacgacaatgtggtctaccgatacctgtatgtcagcatcgccatcgcgctcaaatccttcgccttcatcctgtacaccaccacgtggcagtgcctgaggaaaaactataaacgctacatcaaaaaccacgagggcgggctgagcaccagtgagttctttgcctctactctgaccctagacaacctggggagggaccctgtgcccgcaaaccagacacataggacaaagtttatctataacctggaagaccatgagtggtgtgaaaacatggagtccgttttatagtgactaaaggagggctgaactctgtattagtaatccaagggtcatttttttcttaaaaaaagaaaaaaaggttccaaaaaaaaccaaaactcagtacacacacacaggcacagatgcacacacacgcagacagacacaccgactttgtcctttttctcagcatcagagccagacaggattcagaataaggagagaatgacatcgtgcggcagggtcctggaggccacttgcgcggctgggccacagagtctactttgaaggcacctcatggttttcaggatgctgacagctgcaagcaacaggcactgccaaattcagggaacagtggtggccagcttggaggatggacatttctggatacacatacacatacaaaacagaaaacattttttaaaagaagtttcctaaaataaaa

SEQ ID NO: 1045 - protein, 655 aa, Homo sapiens; identical to SEQ ID NO: 1041

SEQ ID NO: 1046 - DNA, 146793 bp, Mus musculus
  misc_feature (1)...(146793): n = A,T,C or G
aacacccccagaggtgtgctgtctaggaggctccaaatccaggctagcagatgatgaagatcgtcacacctccagtcccagttatggccttcaccctgcacatctcttttacagcctgcatctgtctgcttctttctcctgacctacaccaacgaatgcacacccagccccttgagggtgcccctgcctgcccttgtatccagcctcctccatccctgcttccccatgtttccctgccctgctccacacttgcaggatgccccatggctggaggctcctgacactctgggcacaccccacagtgggcccacaggtgctgattttaccttgtcccaacccctatgttctccatctctctgtcactgcccatagcctaccccaggcttcaagcacacacttgttcacctcgagtaagatcaaaaataaactctctggaacctgttcaaaggctaatgtgcctcctctcctcattattgatttgtttattacagatgcttgggtaggatattcgatgaggctgccgtgccagggctcctttaacaatcctcgccctttgccgggagcaagctggcctgatgaaatcttggaaaggcttaccaaggtactagggagatctatcaatggaaaagttttggactggctagcttgtggtcctggcttaagcctatgctagccccgactccacctagagaccacagccaggtctcccctcctgtcttttcttccctctagtgataaacttactgtgggaatacaaagagacagttcccctgaaaagcaaggcagcatctctttcccttcctacctcactagggggcagctgaatgtaggaagtggctgtactgtttagaaagacttaggttgaagactcctctgataggactctagctgggtaaccccggacaagtgactgagcctctctgaaccggctttctcatccataaagcaaagcagttatgcagattcaaggacattgtgctcataaggagtataggaagtgttgtgcatagaagtcagtcactgctttgtggtcacaattgtcaccttattcattgtcactgtcatcctgcctgtcttcatcccaggatcataggaatgacttacttataaggcacagcttctggatgatccccgccccctcccagtgacatacacagcagagccctggggaaactatgacatcttcacgaaggtcaccaggtccctgccggcagggctatttggacatagaccttcctattctcccagcagaggctgtgcagggggaaggtggcttttgtcaaagggagacagggacagtgtttaggggaaatacctctggcctgtctttcttaagtcctgagagggattcttgtatttgagacctggaaggaggcatcatgcagtgtccccaactttggggtatcacttggctttcattggctggatgaacccatggagcctgcatgcatgtttccaggctgggcatctatgaccttcatctcaaactgcacattcattaacaactctgggaactgaccaggctgcagccagagctcagcagggccaggtccacacctatttcaaccttcgctcccttcccaacctccatcccggaactccccggggctgggctttttgttccctggttcccaggcagtgcagctggtgctgtaggctggggagggggcggaggacgaagcagaaagtctgtgggagggagctgtctcttagttccaaaggcgagcaaaggctgtaactgccccctcctcccaacatgatgcttcccctaattcccacactggtgtctcagcaaataaggctaatttttttccccatttgctcatgatagctacttaaatgtgtgtacgctgctcctagtaattgtcagagctgcgagaaaattagagcagatttggtgtattcctagttttgagtcccagttctgttggcagatatctggtctcgttttctctgagcctgaagaccttgggagtcatcccctcagtcctcagagagcttggattcctattctgcttgtagaggcaaaagccaggatggcttgtcctgaggaggaaggtcaaggtttgggaggaccctgatgcagaggccacagaaaatagtagaaagaagggaagagagggctttgatgagttagattctgagttgggctgatcatgcaccctttgttatgcagcttctaaaccatatagcaaggacgtttgtgagagacagctatgggaatacccatcaggcggggaggtgtctaggtcatcagctagcacctgctggaatgagagtttgaactgggtttgcttagggccgaaccacacactttattctccttagaaggaagaggagtgatgcctgctacgaatggaggtgtttccttgactttccatgcctgaggaatcatgaggtaagggaatagctgggtagcagttaaggagcaacacgctaatggaacgtcctgtaagctgggattagtggctgtcaagtggatggtgctgagtgttctcaggctgttttcatgtgtcaccatattaatccctgtgatccttagtcccccaagtgacagagaaggaagtgtcagatcagaggaacaaagttgcatgttcaaggcgacaaggcccaatatgttctcaatgctaaatgagtggatcagttatagaactaggcccgaaagccagtgttctacagtctgagccaaaggctcagggccaggtcagggggaaggtgtgatgcagacttctcagcagggagcaggtgctgagaaggtcagttgtgggaggtggtgatggcagagcaggagcctgggagctgagcaggagtgggaagggttggcaggggagtgtaacagggtatagtggggaccccaggagttgaggagggctgaattgggatgcatggttcagaagaaagctttagctgtttgcagggatgaggacatgtggtaaggatgctgagcctgggctgtgacccaggaccaggcagaaagtgcaccaagggtattgtttctggaatctactctttccagcctttttctgactctgagaacagagccacagagctttctgtgtctagaagccccctgacatttttcctaaccatggtgaaatctgtcgttctaggatgggggcagtagtgagctactccactcaagtcttccgttcttaacttctcacagagatctgtatgagctttcaggcagctcaagctttcactacatcaccccgtcccagatgtgcattgtcagttctggaggtaacagcaagggaggctctgagaagatacaggctgtcacaggtcctgtccttcctgcacttgctggtaccctcctggtccctgaggacacagacacagaaccctgtcatgtgaccggagagacagagaacagcaggtgtgtagagcaactactccctgaccttcctttgcagagacccttagcatgtcctcagcaatgctttgaggaggttgctcagtcagtacagagattttggcaagatggtgaaccccggacacttccattttaaagcctggagtagaaggactgcccctccggggatcaggaaggctcccagactccccacctctccctttgttattcttggttctcttttctgaagagagaggactatatctctggatgcccttgggttggattaatgagagggaaatggccagatgctcccaggagagctgcatgtagtgagtgtagagagtgggtgtgggtgatcctgaaagttgggcgtagcccccaggcctctttattcccactagcccctgtcaaccatagactgccatagactcttctgggaagcttactcctttggcttttgattttactcgagaaacagaacacagagtgggagacgcttctttcctgaatgccccgcccaccagcatcatctgtgggttgccggccacagtgagcatttccttatctgctggggcaggacctaggtgacacactggctggtggcagctaccatcacgtgcatgtgcagcccctcctccctctgctgcattgatttctcagtctcaccccactgttcgcagcttgcaatgacttggcaaggcttgtcttctataatagagaccaatgccacctccctatttagagggagcaataaacatgacaactggcatgggataggatcaatatctgttgtttagggagagatgcagccctgtgtactctgccttgggacccaggacttgtcagatgccctctggtagcaccaattctgaggtttagggatagagtcgcagagcatcatgggtgttgccagcatcccatggcactggcagtagggctcacaggcttgccaggaacttctctgcaactgtaagcgaggtgagcttgggggggggggtaatgagttccaccatcaatgggtaccagctgccgatacttctgggctggggccgtaaagcccttaaaactctcaaaaggagaaggcaaaagccagcacagtatgcttactggagggcaggcatggttcaaagcacctttctatacctggtgagttaaagacagttagagaagtggaaattgaggcatagagcctatgtcacagagacttataggaagtaagtttaactctcagcgacatgatgctatatttagtctctttatagctttccacttcttgggtccccagagttggatcacttgaagcctgtgggatttaaagccattgaagatttgaatgcattgccacatttggagtgggggagacctagaaagctgtgatttttgaagtatagggaaataactgaggtactccgctcagagaggtaggagggaggccagcaaccctgtaccttgtagaaaagacagtgggtttagcatcagcaccagcatggaagcttcatttcagattgaagactattggaggagcatggtggcttggaacaaggtgggaggctttgggtaacactgaatttcctgtccctgaggatgttcaagcaggggaggtctgggaacaggagtattctgctgagaaaattcctgttaccaagtggggtggctctgggtgagggaggtggtctgtttcacccaacacgggctgtgggtctggctttcagggtagctaaaacagggtgcagcctcacccagatgtcagtggaaggaccaagaaaaccatcaaggaatcttcttcaactgacaggagtaagagataaggacaccccccctccccatcaacaggtagcttcaaccccccagtaggtgtttgtctaacatcttagaacttgagttggggtcctgaactggggtgtcctgtgcttaaattttcctgctttgtggggcttactttgatgctcaacttgtccaccttcacagattcattttcggcatccagatttggctgaagttctctccttggcctccgactttatgaatagcattgcatgttctcagtctcttgcatgggcacctcttcttctagcacatgacgaggtctgtctcttccagcacagctcttcggaacaacaagttcttgggagcccaggcctcccaccgtcccctcaggtgttcctcagaactgccattcgggaccattgctcctttctcagctcccactgagaaactgggtcctaaatcggctcaggctagaaagctgtgcagcatagcttctcggttcagactgatattgtaggagtaaggcatagtgggtggagtaaggtgtaggagtaaggcaatatttagggtctggcctccatcccagaaatatggccactggctcagaagtgtggagccattggaaatggggatgtggcaaggtgaaaagggtgatcattgtgtgtgtgtgggataacgggggagtcttagaaagcactggttgtggggtcagcacactatgttttttttgcttcctgaatttctactcccttcctaggtacagggactttgagctgctttgaatccttcctcagaagttatgggcattcatagtctggagcggatttctttaagaaagagacatgtgcttgatttctgtagataaatggggagcagaaggagctccgtgccctgttaggcagccctgtctgacctatacggttggagatttccttggaacctttggaagcccttggcatcttctttaagcccttgcatctgccttgctgggaaagctttctaagttttacattttgtacagggaaacaaacaaacaaacgttgttccttcttgtcccttcttggtcagcagggggttggagggttggtgtgcactctccagcttcctcatttaggaaactccatctggcagctgagaagatggggacagattatcctgattgtctggatgctgagatgagtcatatgtccaggacacagaggccacatactgggaattcaggatgatatgacaagtccttcttccctgtcaaccaggacattctcagcaagatgacagcatggtttgaatgccctgggtacctgttgactgagaggagagtgtctgtcccagggactctgtcctagccccttacccatttctggcttactttgactgcttttctgtggcctgtaggcgtttcactgatagtggaagtttaaagatctcctctctctctctctttctgtgtgtgtgttcatgtttatgcacatgtatgtgggtgtatgtggagtccagaagttgatgtctggtgttttccttgccctattttttgagacagggtctctcaccgaatcttgctggccagctaatacctaacaccagagatcttcttgtctctacccccagcagtgcacactgctaaataaatccattttttaaaaacatgggtgccgagtcttcatgcttgtgtgatcaatactttattgatgacagccatcttgccagccccaaagttctgtttttgcaggcacccaagacactcatttattctaactggatgcttctgggaacctacatggaatccctgttcctttctaatgagtcccttcatccaaggcttgtggagaaccagagatgattcgagctgtaggggctctgaagctgcccccaccccatgcctgtcaatcacctaggggaacttcttaaaatgtttggtttgggaagtctctgatgaggtccaaggagttgtattatctattacaagctggcagggactgtggatgtcatcagttaaaggagagcaaagacctggttccatgtggtcatttcatggatttgaaagctgaggcccagagtgtaagtctatttgttcatggtcataagtagaactctgctctttccacttgcattaaaaaaaaagagccttcttcatttttaagctttactttctaagtgggctcagagctcctagcaccttaccttcatcctatccacggtcaagaatgaaagaccttttgtccaatcagagtcccttgcttcacagcctgaattttcactctctgaagaggtttccaaagttttgctttgaaacccgacttatggatagcatcctttctttgcaggcagtaataaaaatcgtccttgtccttaaaaatgggcggggcaccctttaagacacaactatgctttctccttgttggagctctactaaatcccctcaggcagtcagctattctgtctccctggggtagtctgggaaatgcttcctatttctcctctgctatctctcaagagaggccaagttccagtgtcctggctacaccttactctccctgcctctcagagaaccctaaagtcactcaggatggcacttgaagtgtcagggagattcccaatggacaaggacatcagggactggcctgaagccagtaggttctggtttgagagtctaaggctgtctccactctgtcccctcctgctggcgggagggcaaaatgccattctggggacaaggccatcatggcgacagggtgtaaaagtctcactggggcaaaaggaaggcagagtgtaatgagaagtcggggaaaatgccttttataggcatgctcttttcttttcctcctttcacccaagtttactcccagcaaaaagtgttactgcaagccatcgggtctgtctgtcggtggcactaggggcaggctggtggcaccgcaataccccttccccccatcttgcctgcaagttgcatgacctgcattggaatccacaggggggcgggggagaatcctttcagatcctggatgctgttgaattcaatgtattttgcttccttgcctgccctcacccaagctcggggaggagagcgctgctttcttctgcgtgtgaatgctgtagtgtgtctgcctgctcggattcccctaaccctttcttctcctttcccacagcaaaatctcaggctttctcaggaaatagctcgcatttggcatatttacatttgcattttatttttaaaacaatcctatcaaggcaaaaagcgggggctatacttctctccccatcaggtctaaacttgcctcgaaggctgcacctgttttgagcccctaccaggaaggggtgtttgtgggggagggaaagaggaggttctgtgccccccaaatcatccggagagagcagtccgcccaccccctcaccaggctgccagctcggcgcacccgagggctgagcccaagaagctggcctccgacggtgctggcgtggtgcttgccaaaaaatgcccttcgcatctcaatttcctggccgcttctttcgcatgaatcgctcgccctgggccacctcggttctccagcgcagtcctgcaggcgctccttccctctttctctccttctctggtccctgtttgtccaaggcggaacccataacgcaccgccaagaaggagcaataggctcaggggcactcagtgtgccatgccacgcagtcccctcccaagctgagcccagctcccgggactcttgattacccaaatgagtgtcattcagatctaggtctgcacgtctgcggccggcgtccctggctgcctcgctcgggttcctgtgcgctcctgattcccgtcactgtccgtgagcccgagaccctcactcaggctggggagcatcccgggtcacctgggccacgctcatttcgcttcctcctgcggaggagattgcagcaaaaccgggcagcacgagggccaaaaagtggaagggagaacgcctttcgtgttgctcagtcagcttgccaactctccctccccaacgccgaccctcggaatcccaactgcaacttttcctttccgtctcgttttcccctcggctgcagcgagcgggcgcgggcgtggagcgggcgggcagcggcgcggctgcgggtggcggtaccggcgagagccgagagccggcgagtgggtgggtgggtgggggannnnnnnnnnnnnnnnnnnnnnnnnnnnnnnnnnnnnnnnnnnnnnnnnnnnnnnnnnnnnnnnnnnnnnnnnnnnnnnnnnnnnnnnnnnnnnnnnnnnnnnnnnnnnnnnnnnnnnnnnnnnnnnnnnnnnnnnnnnnnnnnnnnnnnnnnnnnnnnnnnnnnnnnnnnnnnnnnnnnnnnnnnnnnnnnnnnnnnnnnnnnnnnnnnnnnnnnnnnnnnnnnnnnnnnnnnnnnnnnnnnnnnnnnnnnnnnnnnnnnnnnnnnnnnnnnnnnnnnnnnnnnnnnnnnnnnnnnnnnnnnnnnnnnnnnnnnnnnnnnnnnnnnnnnnnnnnnnnnnnnnnnnnnnnnnnnnnnnnnnnnnnnnnnnnnnnnnnnnnnnnnnnnnnnnnnnnnnnnnnnnnnnnnnnnnnnnnnnnnnnnnnnnnnnnnnnnnnnnnnnnnnnnnnnnnnnnnnnnnnnnnnnnnnnnnnnnnnnnnnnnnnnnnnnnnnnnnnnnnnnnnnnnnnnnnnnnnnnnnnnnnnnnnnnnnnnnnnnnnnnnnnnnnnnnnnnnnnnnnnnnnnnnnnnnnnnnnnnnnnnnnnnnnnnnnnnnnnnnnnnnnnnnnnnnnnnnnnnnnnnnnnnnnnnnnnnnnnnnnnnnnnnnnnnnnnnnnnncccccaccccacccccctctcctctcctcctcctcctcttttttagaagcagcgatcggagatggatgtctctctttgcccagccaagtgtagtttctggcggattttcttgctgggaagcgtctggctggactatgtgggctccgtgctggcttgccctgcaaattgtgtctgcagcaagactgagatcaattgccggcggccggacgatgggaacctcttcccctctcctggaagggcaggattcagggaacagcaatggggaacgccagcatcaacattacggacatctcaaggaatatcacttccatgtaagtcaggcggccgctacccagcccgccccccacccccgccccagcttcgcgtctccgtcttgcccgcccgcggcccgggaactggccctgcgctccccagctcgcctctgttcgcagcccgccgggtgcgcatcaggctcgccctggctcgggagatgctgtagggctgcgtgtttcaggtgactccagccctagccaggcgtgatttgatgatgctggtgggtacctctccctggagaggacccttccgggcggagtgcacccgggcccagctcctgtccccgcccccaccctctgcctgctcgtttcgagggtgcgaattgggttctatgccccccactaaatagcaacagtttggccacgctcaagtggaataaagtagaggcgtctcgtttccctgacaggcggtggcagatagcggcggcagaggcaaagcttagcctagccttggagggaaggtgacagatagggactgcttgagaaccaatcgggattttttaaaaaaaaaactgtttccctttggagagagcaaaacatgccaataagtaaacaagttggaagctggcttctcccgaggagacttcggacgtgttctggccgtcatggacgcctacctctttgcttttcctcccccccacctcccgccgccttctccaaccccattttgggcatttccgagacatccccccctttcccaccctcatctgcatctgggcgcctacagaccctttcctggcttgggcttccataactgcccagggtaattctgagtcaggttgctggaggcaggagagagaggacgacctgggttttgggaaggaaatttctttcacaattctgcggttccttccccccaccccctttctctcaaaaattgaactctgcgtggcgtttggctggtttgccccggctgagtgggaccctgtgtagtggcctgctcttttcttgttgttgtgtttctttggtagggatggggccagaggcctgtgaaggagtgaaaggaagagtcagggccaggagcctgcatagcctttctttcattcttcattcttcagccaggtgaccaccacccctctgacctctctgccccaggaaggagaagggtgtggatagctcttggatgctcggagggcagctcattggtttttgccccgtgctctcatcccttgggagccccaggactgactaggacggtggccaggctctgagggagacgtttagggtagctctttgccttggggacggactagagcaagaagggacccagtgtgctgtggctactgccctctcagtgtccaccccctcccctctttgctccaaccattgcctcaggactacaaagcctgaaggaattggagtcaggctctctccaaagcccaccagttctcttggtataagagagaccagcttgtgttcttgcagcttacactttgagggagatgaacagccccagaagatgtccccgactcctggagacaatcctgacccatatcttagctctgcctttcattccttactacctccaggatggtcaaggatgtccagatagacagcaaaggggtaaggggaggggagaagagagcaaaggagaagcctctacccacttggaggccagtgtctgtccaggagcaaggtctggaggaatatgtttcagggaagcttggcccctggattgtagggatggctgcaaagagcttagtggcctgtgctctggagttgggcatggagattttcaggtgattggatgtgccaagggctggagagtttgggagccagtgagctgtgtctgccttgttctctgctctaaggatgtgtatgtccctgggaaccctcagggaggcaggattggtcacaatcagataggctctttatggtcacgaagaggtgtcacacctctcaaaatgaggtttggggaagcggttctatggggggggggagtaggattagttgttccccggagacattggtgggaggaggggacacagttggcctcttgctcctctcctggcattagaggatcccaggagagtgcctgtggcgatctgagcagggagactgggagccgctcagtgggaactggactcagcagccatcaggactctctcctaaacccatctgacatcaaagagaaagtggtagggaaggtcagaggtcaggggttagatgaccctccctcaccccatcttccccccagtgtcctgttatgcctgcgtctggtattgactaaactcaagaaggggctcagactcccactccagaggcaaggagtcccgaggagggagaggattcatgttcatccagggaagaacatgcccttgttgctctcttactctttaagacatggaagattaagggaaaaggtagcctttcccaagcccgccttccatcggatcttagcactgaataatgggctatacaacatatatcccaggtccccaacccaaggcctgctggtagaggtggggcttaaagaaagagaagcacagggcaggagaggatccaaccctaggggggcctgggaaagtgtccttcagactcgtgtgtctagagatccagggtcaggagggggcatcgcctgtcagcctggagctctgggtgatggcgtgcggctggacaaattctaggcatggagagacggcgtctcctcaggttcttctcaagtatccatcctccgagagtgaactctttgtgctgagtttttagacagacaaggttttgtttccttgtggccccaactcttgtggtatcattctgagtggtggctgtgcccatccagagctttgggtagaagagaccttgttaatataaggaggaaatcagcagcaagcatcagggcagaggggtagacctcgtctccatctcatcatagtactccaaagagtccatagctgcgccaaagggtccttcctgccttctgtttgttccctttctgttcaaaagggcagccctttctttttcttttttcttttttttttgctactgtagctcttaatacaccataaactcttccagaagggtccataggcagccacacccaactagactctgacgtcacaaaggcaggagggtggtggccaagatggtgtgttgtctaggctgcctccttaggccgggcctacagggttgtgttggcttgggatggcgtgtcctttgaatggtggaaagaagatggaggtagagactgtggcatcgctgggtcagatgttcttgaggtcgctagcctgggctcgcaaagaccatgtactctggactggggcaccgagccgccatttgtataccagcctgaattgccacagggttccaggtgtttggtgggcttttagtttcctgtatttccccttcccctggagacactttgcagactgaaggggtcacctgggggctctgctctctaggcttttcggttttaaggaatgggtgggtgacccagccttggcaaaggtcagtgagaactagagtcctagctaacatatgaatcagggctgtaaaggccccacagcaaagtattaagagccccaggattggggttaagcctaggagaggtaggcagagcagaaacaggccttggaggttctacttgaaagcaagaggtaataggccctgggtagagttatttccaggctgaaagctggggcggtggacttctttggtggcaggattttatactgaggccaggttgttgttgggtgtcagcatctcccatgacccagaatcctcagcttcagtatgcccagcaggttccctttgggggccaaggacattagctctgagactacctgggaactgagaacatgatagtttgggcaaatccagtagaaccctgactatagctttgagagttcttgtatggtgggcccaggagggttgatctgagtctgggagattccttagggtcctgtaatgttccaattgctctctgtgtcccgtcttgaagccctaattgttgccctgcctaaccgtgccagctgacccttcccatctggaaaggatgctggccccaactccagatgaatcttgggtacatggtatgtgattatccatggccctttctgtgtatggcccttaccagtgttgtgacattttctctgtgaccaggggtctccatctcaggttctccattgggaggctcttacagggctgttgtgcctttgggggtctaggaataagaaaacaggatacagtgagttataacctggatttcccccatctgccttgagatattctggagggctgcagccacttcgaacctgtaaatctaactgtgaatccaggccatgggtcagagtgtcccttccaacatggatgtctgccctctcagcaccagaaaacatcccccaggaaggttagcctcttttaagggtctctcttgtggaattagaacggccttgtgataccactaagaggagggcacaggtgagtccaccctggatgtgagccactgtcattctttccttccccatgtctagaaatgtcaggtcaaccagaacttggctgaatttgtgacacaggatacaatttttttttcccattaactgcctggaccaaatgtgtggatctctagattgtttttagggtccttagcctttccttagaggttgggcaactgactctatgaccctgattcccagccctgggctcaggcctagaagagatgtccttgctaagatgtcatctgtttactggagggaggcagctcccactgcgtatgggaaaatattagaacatctatcgcaaattattctgtcgcctacaacaggagagatttaatatttaatgtatggattagagatatcccagcatatgataatttaataaatatgagtgtttgggtttgtgagatatatgtttttattgctaaatcatgcataagcagaacaacatggtgcccctgttgcaagtgatgcacattgcatttggaggggacgggacaggagaggtgacttttgaatctcttctcccttttactcagttcttggctgaaggcatttgtgagccagcatgggtagatgggatataagatgggaccgggctgagtgggcccaggagtggttcctttctctatcataggtttcaatgctagtcctccccccaacccccgccaggagccaggccgtcattcaaatgatgccttctgcagtggacacatctccctggagttgtccaccaggcatttgtatcactagtcccagtttgcagttgctcagctgttttttttgcaagaactatttgagtcgaataagcagggctgattattcccattttacagattcatcaaacaaaacaagagcagaactgtggtcttgggggattgagttaccatggagtttccaacagaaaggatgagaggtgttgggagagctggtcgctattttccagtgtacctcccctgttggtctgcttcccgtggctccattgttcttgggctgaccctctcattagctggataccctattgacctgtttccctaaagggaaatgtggaggactttctgccagaaagctctgttgaccaaagagcagcattacagaagcactctgttcttagggacttggaaagggtagctgaatgttgtgtatctggtccaagcctggcttggatggagggtatgtcacccagatctgctggtgacccagagtgatagctaagccagagtcaactgtcactctctgagccagactctggtctggcctctgctttggaaagcataagtccttgttggtggccagtcatgggcgcagacttccttaggatggcctgcatcatcaagagtgaccactcaagtggttccctctagtgagagttctctggaatcttcccccactggaggagggatcaccagaacttttgcttctcttgagtgtaaggtaaggctccccaaagttggagtgagagttggggggctggaagactgtaggcatggccttcctcatgttcccaagaattcagggccttgagaacaagggactcagttgggttgcctagctagagtattgggaaatttctttttccactgtcactcccaggtacttggtgtggcctcctgcactaccctgcctcctgtttgagggaactttgtcaaatccagagtctcctccattcctgtgtctccctctggggcaatgtttccaaattcagggtccccagaggcagcaactatgtgaaagctggcagccccagggctccttggagcctgcagcccacgccaattagaaataaactcagagggctctgctgagctatttacatggatggctggggaacggggtactcagcaggtctgggagtcctttcccctggcctcaacttctgtctctgctgcctctgcctggcttgtactgccacaaagggtcgtctggtttagagtggttgaagattcaagattctaactccaagcagacatcattagacttggagatctgggcaatttctatctcccactgctctacccagcctggcttctctctagctatggacaaatccctttgctcccatgggcctcacattccttatctgtaagacaaagagaactaacataggagagcactgttaaaactcagcgtccagtcacagcctggcaaagagagaaccgtgatcacgtgatcactactactacgagccagctcttactgagctctctcagtaactgatcacagtattaagtactagataattgattatagtaaggactagataagtaatgataattatcatttactcaacacttactgtatcccagaacgctgctctaaccttgtgaattaaatatacactagtcttgcttacagatgggaaaactgagtctaaagaaggaccttgatttcatatagcctggcattttaaacattctggcttttaaatattaaggtgattgtctatacccttctgtatgctgtggatacataaatatatgcaattacatggccaggtaaacaggcacacataggtgaatatattactattgtgataaattaatactaaaataagaggctggacaagaaggttctcaaggctttattccctatccttctagttccctgggtgagaactaccctggctggtattttaggaaaggctggcaggttgcttgtgaggaaggtgttcatgaaacaacaaagcctcagacagacctctaatggagacaagaggctttggtttctctgctggatctgttcccaaagtactgtccttcctggaggaggctgtgtcccaccctttttccaggcacccttggcttccccacactgtcctggcctctgagatctccagaccccacattagcccaaggtgcaagctgggtcaggcagggattctgggaactgcttgctgggcagtagtcatcccctctctgggttgaaggccaatgctcctgatgttcacgaacagagagaacctggatagaggagagagggctgggtcatgtctcttagagctttagggtatcagaactgtctttggctacaagcagaaaggtgtgtggtggggaatttgaagagctggtcagctagagttggcagctgatgttgggagtatcactcctgagtggggaggtctaggtgttcccgggcctccattttactgtctacataaatcagtagccttcactacctccagtccctgcctcttgctcatagatgtgtcatctctctcctgtagggataagccaggacctttagagatgacaaccattgttcccccatggagacaactggagagtcctgcaaaaacattgctgggcaaaccctattgctgctgctccatgactgtatgaacttgctacaccatagaacctctctggcttgtttctactcttgcagtggggttagctaactcgtcttttctcgcagggtcacattattaagtggtatgacagacctccttcacaggttctgtgaagagtctaacgctgtgttggttgtttccatttctggatgactgggaggacttgaattaggaagaagatcaagactttgagccataaatcaggaaaaggaggtggagaataatttgggctagatccaatttttttttccccaagaggaagaacttggcagacagatgaattgatatgtcccagcccagtgagctaggagcacaaagcagacacggatgctgggccttgctgccctaggtctcctcccactgccctttggtgtctgtaccagaggctcagggattgcagggggcaggaaagattggtgagtttccctggagagggaaacgaagggagcggtgttagactcgcgaagtcctagtacaggcttcctgaagcagtacttggtgctgtgtgtgtgtatctgggggcgtctttgtacacgcacaagtgcctctcctcagcgttccctgcacatcacgtctgaggttgctgtaaacaaaccttaaagccgctggcttattgcttgccgagattgtctgtgtgtagactcctggtggccacaagagggcagcatgatgcacgagtcgattcttggtggtttgacccagggagagctggagccgggatagtggcaagtcgattgccagcctgggcttttggatcctgccaggagtcagggctaagcttctggcagggagggcgtctctatagagccggccctactctggttctatctgtgtggtctggggatgcgaggctcccaacctgtgtattttggcttaggagccgctagctccctgggagaaagctgtagggagcctctgatagagggaacatcctctcccccctcagctcagtctcagagggcgcatagcttttggcttagacagtggaaatgaactaaagggacatatgttcctggccaggaaaatcccaggcttggtgggacacagagagttggtagtgacactggaatcagggtcttggaagaagtgagcttttactttccgactgctcaggctgttggatctgctggtcagagccaagtaggtgctcagttaacatggcactctggctctttctagaggtgggatcttggtggcttgtgttaactcctccagaccctgggtgaatgtgcatcagtgggtatgagaatgtcttactaatgggtcattttgttagtggtgcctgctgggagtgagatgcattggcccttcatcattccaggcaggtcctgtatttgagcaggacgttggatatcatgtgctcttgagtccatctgtgacttgttaccagtgctggaagctagatcatctgctctgtgctgaactggtgggcctgggacagctcacagctgcctggcccagggatatagatgaggccctctttcttgtgacccatctttgcccaccaacttctttttgagcaatttttcaaggccatgtcactgagaaatgtaggagtgggtttgacatttacagtactctcagcgatctgagtccttcccatgaaggaccttgtattgacagcaatgacaacatgacgtttctgattgtgaccttgccacttctctgtgggaacctggactggctatttaatttctttctttctttctttctttcttcctttctttctttctttctttctttctttctttctttctttctttctttctttctttctttcttccttccttccttccttccttccttccttcctccctccctccctccctccttccttctctctctctctctctctctctgtttgtttctttttttggtcttttcctcatctgaaaatggtgatgataaagaagagcccagggttgctcgtaagattgcagtgaggatgtctgtgggatgggaaaggctctgaaagccgttttcctccctcttcccatcagagcatcccaggctggtgtcatcacaagcaatggtattttcaagcccttcatctgttcttcccacttctggtatttcccacatcctgctcgttttacacatcccaacagattcatctcctcttagggggttacaagaattcccatgctcccagcatttctgttgtttttttccccctgagaggcagctcagtggctccaagagatgtggggttttgctcagtggactttcctgcctctgttgtctttggacccaggtaaacccctcaatagctctgagatggaaactggatcagttgggttgtgaggtgcctttcctggaatgggtacccagagtctggctggtgtgtggaccttgtaggaggtggggagcagtaacattttagagatatggattaaagaatgttgtgagagtagccagcacctagaactagatgcaggaggcagtaggagagtcaccatggtgtacattttaggaaggggactaagtagctgaagcatgtgtctgtcaccaggacagggagagtatggttcctactgatatgacacctgcctgacctaccaagtgccagcatgttccaggcaaagccttcgccctgactaccttccccatctccagcaccaggagtttggatgacagaaacctttgaccaggttaagttaggagtacctagcctctggacaatattgtcccacacggcttcattgctgtcctttcccatatcatttgggattcaccagtaggtttcctgttggttactgtaatcaaatcagcttgccagccacagaggtgactccaggacttgccctggtaggaagagtttagatattaattatggtagggagcaacactaaatccctccagcccaaacataccaatcaagtatattagcttcagttccatattaagccacaagagggcactagaccacgatttctgctgtgtaggtgctatgtagcctattgtgattgctcctttgagaactgtccactgcacctggtctcttcccagaagccagcaactttgaagtcatggccaaccggcttgatttaactgcagctcaccacactgactgaggtttcgagggaggtctatttgtgcagtgcaaaaaggtcattgcatttggtgtcaaaccaagggttccagtttgtgcccttcttgcaagcttaaatgatgaatgaagttactttgtttttctttgtatgtttttctccccccaacctgaaaggtgagatgttaccaggaggtgtggttgtgagagaagctgccacagggattaaattgcatgatgtgtggaaagtcttgaacacagtggattcccggtgactagcctgactttttttaggaagaaggataaagttaggtcacaacccaggaatcctgtgggcttgatggggtccttttatctgcttctttgacaaatattctgtggttccaattcactgggggagcagcgctatgcagtggctagaatggagagcagcaagtattgggcaggtgttggacgtggttagagtcagattgggacaggctctcggccaggggataccagatttagaggatccattaatgggctttgcactgcttaagtttctgactgctgcggattatttgctgaggatgttagcacaatgatagctgttagtggtgttgtctggacctgtaggaggaagtcacaagtggactaactttattgtcaccaatcaatcttggcatcttggcatctaatttcaggcctttcttggtgtttcctcgggtttctctccctctctctcccttcctccctcttcactacctgtctgtggtggatgttcctatcttgggggcatgttagtacattggctttgccttggttaagagactggagggtctgtggtcagtgcatctatctgaaaaatgggagctggcacggttggttagacggtacttccagggtgattgtatattctttgcttggtgtgtgtacggtgtgaggtggggtcaggtaacaaccgtgtattaatgacggctaaacttccagttttgctgttgatgcacacagcttggaggaggtcggggtcttctctcagcaaagctgaggctggaacagaggtatctctggattcatacccctcttagcctctttatggatgtacctgagactcaggagggaacattggcaggcatgcaggctcaggaagttatttaatatcagctttgctccagattgtgtttctgactccctgccacctcttaagtggcagtcattttaacaaatgtggtgagaagacactgagtgggaaataacatgaaggaagggaagagggacaaagctatggtgggggaggagcaaggctatggtgggaggggcaaggctatggtgggaggggcaaggctatgggggtgaggggcaaagctatggggtgaggagcaaggctatggtgggaggggcaaggctatggtgggaggggcaaggctatggtgggaggggcaaaggtatggtgggaggggcaaggctatttgggtgaggggcaaagctatggggtgaggagcaaggctatgagggggtggagtggggaggagttatatttcctgggcagacactttgatttgaatgcacccaggaagaagtagcatggaaggggagcaagggcctctcagttctgagtgggaagagaactcccaggaagtgtctgggtcttagggttgggggggtctcctggtatacctctccctcattcacagaaggttcttgtgttctattggagtgtctggctctgtctttgggatagatgttgtgactgatagcgatcatctttccagggacagttttcaaagtacacagcagacaaagagctcaaggggcctgatgttgacactttagcccactgtgaatactaggctgtccttgggcatagacagtgtggtacccaggtatccggcactggccttgttgtccagacccttctagcaactgtactctggaggaagagtagacagatgttccaacagggccagctctgctctgccaggtgtaggaaacagaaaagaaggagtccagtttttgtcatgccagcctgtggcaccagtcacagacctgacacactgctaagccctggggtccaacttcatgaaaataatcattatttatttttccccattgaatcttaaaattagacagatgatctgtggctcttcagaaaggagatttcagctaatgaaaaaagttcaaaggaaagtgtgtgtgtgtgtgtgtgtgtgtgtgtgtaaaactatggattccctgaggtagacagggaatgatgttcctaaactgaggtttagacattctccacttgcctgccccaggtcccttgaatgttggttatcagtgttgtgagatatcaggttattattacttcttggctataacgttgatccattggtcctgctgttacccacagaagccttgtggcattttaggcagacaaggaaggtgagttccagttcttctgggtcacactctgtctatgtgaagcaaagattaggagacaagtagtttgcttagaaggcaatcccaggaatctagaggagagaggggacacgaggacaccgaagacctgtgtgctctcgggtaggcagatgttccttgtgcttattaattctcttatctggatatttactcatcgtgagggcttgtgatgggccagtcgctcttgtggaagccatggagacgcaatgcaagggacatgcagacagtttgtattatctctgttgttttaggatgtacaaggttaaacatcaactctctaggctccttgcctttatccctggacactgccacttgggatttacattaaaggataagagatgaccagaggtggccaggccaatcctcttagactctcagtggcaaatttttgaaaagaaaaaaaaatccatcagcaggtgcgtggagtcagaaaaccaggtgggtggaggtgaacctaggtgagaggtgcatagagtgggataagagatgggtctcacgtgctattgaagaatgggactccagcgttcttttccagcatttaggtacactttgtagcctgagtgaatctgagccccccaactcctctgcaccttgatcccagaggaacaaacttctcctgacctccatctacgattagttttgtggacttagattccatcctcctgaaaatgactatttcttggtcctcgagctccactccagggctgtgactgctggcccaccagctcaactcctgttctttgtacagtctgggctcttctgtcctggggctttctggacagtgttcactctatcaccctctattgtgaatcgttacctacccaggggggtcaggggacagatgatgttgacatggctcctctgttctatccccgtagtgagctcctaagagtcctataaattagagcaggctcacctcatgtctccgatttctctacaagtcttctcaggttggtgatgctgcacatgtgtgcctgtccctggatgttgggatgacaaaatagaactttcattgctttctatacttccatggaccctgagttctactctccccttattggaaaaatcttctagggaaatttgaattcatgcacagtgatagggaccgtgttccaggagcaattctaaggctaagggtgctttcagttcaagcctttcccaggatcctgagacagactctcgtctagccatacacccctcctctgcagagctcgggatcacaagtgctttgagtctcagacagctttcagccatgagaatatttgcatatatataatgatatatcctggggctgagactcaagtctgaacatgaaatacatttatgtttcatatatgcctaacgcacatagcctgaaggttatatatactacatttttaataattttgttcatgaaccaaagtttcctcatgcagaatttttcatagctggtgtcatgctagggatccaaagtttatgattggatcattttatatttcatatctttagagtaggtgcacatgcttgtgtgtgtgtatgtttgagtgtgtgaatacatgtgtgtgtgtgtgtgtgtgtgtgtgtgtgtgtgtgtgtgtgtgtgtgtttgcacaggcatatgcaggatttctgataccaaacatctgcttctgacctgagaatttttagtgtggaggagcacagactgcaggaacatagccatactcggagtgtgactgttcactcctgtgcctctcaagttctacagtctagagtgagctcaaaggtgctttcacattttgcataagacttttatgaatagtttctcagactgttagaagtcttaatgccgtcctcttcaaagaacaccagcctacttcctaacaggttctgacaggattttattatggtaccagttttcttctgtttcttccttccctttgtcttgtacccgaatccagcttgacctggcccacgtccatacacctttcctctcagggattcacacaacctgaacccacctagacatagatggtctgatgtgtgtagccaagggataaaagagaattgtattttaaagaattcccttcctcactggagaagcaggagaagccactgtgtagctgcagttcgggaggcttcattggctccaaatgatgataaagaatggagttctgtctgcatttggagcctttcaggttagagcacatctctgtgatgtttgcctcccatgattctctcagaggaatcctggagtccttggccaacccaaatgaccattccctctccattcccaagcgtgtccaacccaggctgttggggtctggaagcttctcctgactaagcagatctctggtcttccttctgctcacttggacacttcccatctctccagtctcaccttcaagaatctctttgttcattaacaacaatggatttatgaaattcttggacaaatggaagtacctggaggtacttagtgaggtaacccaatcacaaaagaagccacttgctatgcactcactgataagtggatattagcccagaaacttagaacacccaagatacaatgtgcaaaacacaagaaaatcaagaagagggaagaccaattggtggatacatcattcctccttagaatagggaagaaaatacccatgtaaggcgttacagagacaaagtttggagctaagacaaaaggatggactatccagaaattaccccacccggggtatccatcctacaatcagccaccaaacccagacactattgcacaatgccagaaagattttgctgaagggaccctgttatagctgtcttgtatgaggctatgctagtgcctggcaaatacagaagtggatgctcacagtcatctataagatggaacacagggcccccaatggagaagctagagaaagcaaccaaggagctgaaggggtctgcaaccctataggtggaacaacaatatgaactaaccagtacccccagagcttgtatctctagctgcatatgtagcagaagatggcctagttggccatcactgggaagagatgccccttggtattgcaaactttatatgctccagtacaggggagcatcagggccaagcgggagtgggtgagtaggggagcaggatggagggagggtatagggaactttcgggatagcatttgaaatgtatataaagaaaatatctaataaaaaagaaagaatctctttgttctccagacccctggttttggattattccctctctccactcctgggagcacatagtaaaagcagttgctatctgttgactgctttctgtgcccctgccacagttgatctagtagtagctcacttaatcaacaccataaccacatatgggtggattgttctcattttgcagatgaagaagtaggagacaagagagatacacactgttgtgaggctatcggtatagatggctgagaaaattcagacccaggctcaccgcagaagctgggctcccacatttgtcatagcagcacattcaaaggcaaagtggcgggaaataagctgagacatcaccaggagacatttgaatccagaagggagtcgtgtcatcgtgaagtaatggactcctgtaggaaagaataaacttggtcatccatagagtaacggcaatctttcacaaagcatgccaattaaaaaccactacatgctatatatgtgtgctggctactttcatgtgacttgacccaagttagagtcactggagaggagggaggctcccttgagaaaatgcctcagtaagatggggctataggaaagcctagagggtatcatcttcattagtgattgatgtgggacggtccagcccattgtgggtggatacacacctgggaaagttgtcctggtttctacaaggaagcaggccaagcaagccatgggaagaagccagtgagcagcactcctctatggcctctacatcagctcctgcctccaggttcttgccctagttgagttcctgtcctgacttcctccaatgatgagtagtgatgtggacgtgcaagccaaacaaacgctttcctcctcaacttgcttttggtcatggtgtttcatcatagcaagagcaaccctaaccaagacgatatgtaaaagatcaccgtgactaagagcgtcaatgtactgtttatgatcacagttatgtggcaaaacaaggcaagtggtaaatttggcataagccagtttcacaacttggtttcagggacggagaggaaagcagggtatgtatagggtcttaaggttatttagcttgttctcttttaattttgtagtgctggaaacaaaatctagtgttttgagcatgctaggtaagcacactgtcactgtagctgcatcttgaaacctgcttttcacttctcaacttgaaatcatgtctcattaggttgtctagactggtctgtattccaggccggctttgaacttgagatcttcttgcttaccctcccgagaaatggcgaatgctttcactctgaacagcctggcttctcattgtttatcttattttatcttagcacccagaaaatgacaatgctcaaggtgataggtaggtaatgctttcaacctataatccttcacttttcacatctgttaaaatagaaccctagaaccccgaaacaacaaaaacattacacccgctatgtctgaaatttcaaacaaaagtaacagtgaatccactaaagctgatatcccatagcctaagtgacagaaatgtgtttccccatggtactggaggctggatatccaaggtcaaggtgtcagaaggaccatttccttcccaggtttctgtccttggtttgcagacagccaccttcctgctgcatctttacatggtcttctcttgataaacatctgtggctgagaaggagggggcaggcatgtcatgtaaaaagcctagtgaatggggattttcatagagttgatggagaacctacaagctcccttgggacacacctatagaccagtgatcgggaggtggaagcaggatgatcagatgtttaaggctagctttggctacataaaaggtttagggctagcctaagctacagtcttgctgtgtagcccagtaatcatcttacctcaggctcccctatctggcttcatggtacttccctgatgtatttcagagaaatggtgaaatgttagtaaatgctgcttacatacttgaacatgtataacatctagctaaagtgtggtagtgttttaacttcaggcactgttaatatccggtgaaattcttacatcttcagtgtctattctctgagtcttccccaatgcatgtgcactgtggttctcacatccaccaagatacaggacactaacaacctccggaaagttccctcatgccccttcctagtttgtttctgccaccacctcttcgagagttgaccactgttttgagcttgctaacaatagattacttatgtctgacccacagcttcatacaagtggaatcatgtaattcccactgaccaagaatgatgcgctgctgagattcagccacgtactgtagataacagtatctgattcctttttatggctacatagtattatactgtgtggccaacctggatttatctgttctgtttttggaacccgtgggctgcttctagttttggacttgtggctaaatccactatgaatattcttgtgtgagccttttggaagacatatgtttttgtttctcccaggtcctgggatgtacgttgagtatgtttaacttcctatccatcctggcctctttccttaggagtcgtaccaggtgacatggttgtgacaagtggttgacttgggttaggagaggcttgttcccgtaacttctgctgagtctttgggcccaccgagtctctgacttgcagataagtagacaaagacagctctgctcaaggccacccattagcaaaatgacagagctgggattcattctgataaaattctgagagttgctgggaatacctgtcagcattcttagcccaaggatagatacactggtgttcttgaagcccatttggacactcttgacactgggaaaccagggccagactggcagtaggtgcttcttgaggctattccccctcaggggaggtgcattccagcctggaactgtacacccctatctagaggccaaagctggatccatatgtatcccagaaggaagctgtacaagtcccctgggctagagtcttcttccagtgatttagttgggagtcctatgggaaagggcccgttgttaatcctagggaaacaggaagtctcagagggttttctctgttaaaggaggtgattttgctttaacctaagagatgagtataggctgggcagaggagggtaagcattcagggattccttaggaaggtccttcatccagggggaaggtacatggaaaacatttctaggcgatgagagagctaaactgtaacctagagaatgagcagacattagccactcagagaggtcagatgcgatggatgctattttaggtagaaagaaaactggaataaagagaattgtggggagctgaaggtagctcatccaggctggagaagaagggagcagacatcacgttcagcctggtgactatggccctctcatagagaagtgtgagtgccaggtttggtgggacatgctataatccaaacagttggaaagtggagaaagaagggtcaagagtttaaggctagccttggctacataaagggtttggtatcagcctgagctagatgaaatccctaaacaaaaaacagaacaaatgattgtgagacagttgaagaatggggtagggtcttgtttgtatatctctatccctctagtggttaggacatgtttgactaagtaagagctaggataaaccatgaatgaacagagcacctgctgggagcaggaggcctggggatgtttgcagggtcagggaggttgagaggcatgctggaatgtctaggggggatgtgctaagggatgtctattttctcttggttggaagaacaggcttcttgggatagtgcagtgatctctaccaggttttccaacacctggcagtactttagaagacttagctccatctgaaaggcacctaggggcatggtgacagaattccagctcaggaacactacttgctaaaatatatttgtttattcagagatttaattaacatgtttaaatattaaagagtaaacaaaatgtgtctagtgggactcaacatttaccaacaggagctctggcttatttaattatttgtgttttccctgccctaagactcaggtttctggcttcgttctaggcagacagtggggagtgtaggctcctcctaggacaggacagagaagtgagcctaggaagtaggaaagtagggaggagcggaggattgggaaggaaggaagcagggaggaggagggggcggaaggaaagcaagaggttttctcaagaagtggagatctcccagccaaggaagccaatagctggtatttatttggtacaaagaagagagtgtgggtctctatgctttcatggattgtttgctgataaagtccaccagggcagtgggagcagagacaaagagcaggggccagtatgttcggaaaccctgggagtgtgtagagtgaataaccacagcagaaccagctatcaggaggcagatcaactttacttagggtgactcaagtcttataaagttttgggggactgagggtgggaacatccagggtggataaaggtcatcattggttgagggtttagggtacccaaaatgcccaactagcatggggaaacatttcaggaatggttgaagatgttcttatcaggagaaagaaaatggatcctgtaatctaactgagtctatgtgatattcctcaggtagaagtgtgtgtgtgtgtgtgtgtgtgtgtgtgtgtgtgtgtgacttagaatttcccagacaaggtcagagaaggggaagctctgttaatggagtgtgccatattgcgccaagcccagaggcaatccagtcatggtggacatcgaccttaattagcagagttttcccacagagagagtgagatttgaggtctggagagtacatccaaggtgcaaaatgagatggctggagacagctgagcattcttggttgcaggaggactggagggtcttgagataatctggtgagataccaacttgagtctctctgtgctgattttatgacagcagtgtctctccatgattcctcaagagcctgcagactggacagtggctggctggacagcagctggagaataattggcattgcatcactatgttgcagacacagggagggaaggttccccagccagatctgcaggtagaactcggagatggaggatctgcattataacatcaccacaaatgaagtcctagctgctgagagattacacccggggttatttattggcaatgtgctctatggttttaattttttctttttgcttattcaggctttagctccagaggaaaatagcctggggtggctccgaaatagattctctctgccccattaacttattcagtgagtttaatggtcctttctcccctcagccttgaagccatcattaagaggcagagatttataaagcaaagactgagctttagtcaaactttgattgtgggctgggggagagcaaggggtccaggcaactgggcaccctctgtcccgatgatatgggtgtggacatgagcgttaatgaccttaactttccctggctctccaagggcagggtttgccatggattgctctgaagtggctctgcagggcacggagttgagtgtcttctgttccattttatgggacattccttagctcttatcatagctctaggtcatagcatctgccaatggtgtttacagaaaatagacttctcagaagtcagccttcagagcagttagttcctttcaaatgaaatgacttaaggacagctgtccaacttaccagtgagaaaatggctggtcagtcaaccagccagccaaccaaccaaccaaccaaccaaccaaccagcaaaacccaaacaaaatcacaatagactaaaagcctgagtactggatggtttgctaaattctccagaactttccttcaagagatataattattgaatgaaggtcaagtcaaactacattacctcaagattggtcaatccagctcaatccagttcaccacacttgacttcttccctttttgtgcatctgtggggtaaaacgcattctgctgaggatacaaagtcaggtgagttaggtccaggctgatgagacaacagcaccagcaaagagattgccccagagcagtacaacgtggggattaggtgacagcttgggaagctgaggaaagagacaatgtgtaatttggtgcataggtaggatctgggtagggagggaggtgaaggaaggctgctttaggttgaaggtgcacagaaatgatgggtgggatggaagaagtgcaaggtccctatttacgcaagagtagggaattttgagaaactaagagagctgacaacaagccctgagactcacttggggatgaccaagaacatcactagcctctgtactttgttggcttaatgataggagtcactcaagggttggcagataaatcttaaagttcaggcagtgttttttgtttgtttgtttgtttgttttttggtttttttctcttatgtttgtgaatgaaaaaaaacagtgatgaaaataggaaaataaattattcatatgtttagcaactctctctctctcttcaatagatttccattacttttcttagtaaagttgattctagaattagtgcacaaggcaaaaggtggcctttgaagagactttaattcctggttgaacacagtgagatatgcccactctgagagacacacagcagctgaggtgagctgaggcacagttacaccacagtgaacaaactggatgtggtagcagttaaagcagctactggttcgttctctgtcttcctgggtgaacagaattgaatttgcatacactcggtatgtcgaccagacaagactattgcatggcgactttgtgtatgtgtttccatgcatccaagcagtagttttagtttgcattctaaggatagcctacagtacaacacggactgaagaagaggaggtgtggatacaagtggaagaaactaggaggccattgcaaaccccaatgtgatgtggtnnnnnnnnnnnnnnnnnnnnnnnnnnnnnnnnnnnnnnnnnnnnnnnnnnnnnnnnnnnnnnnnnnnnnnnnnnnnnnnnnnnnnaaaccaaccaatcaaccaaacaacaaaacaataacaacaaaaaaacccttaaccaacaaaccaaccaaccaaccagccagccaaacaccaatgaatgaaaaaaaaaacccaaaacaacaacaacaacaaaaacctcaatcaaccaaccaactgaaaaatcctgattgtgcgttgagggcaggagatagcagggttagggagagctgtaatccatgatggaaaagaagagccagcaggccgaggccctgtgccttctgtttgggacatattgagttgatggtgtttgcgggagaggattgagaagaaggctaggtgtggcttgagtaattgtttctgattggaggctttcttagtgaagtgggtcaccatgggaaatcagccggaacagcttgtttgagaagaggctaaagacttgttctccttccggagctccttctgctgtgtccactggcagccttctccatggctgtccatggcttctcttgtgggagctgcatcaagctacaagcacatttcacctgtgtatttgtaagtggcttctgctttggtgtgccttccctttccactcttctgcctctcgaaggcttatctcagtatagttacattgtgaaataatatgaagatccaaacaaggtgttggtgtggagtgaagagaagacggagtgactcatttggggattcacaaccatccatagctccagctccaggggtctgataccccacctccatacaggctttgaaagcacctgcactaatgtgtacatccccatacacagacatacacacatatgtataatcaaaaataatgaaaatagaccttagcgaaggagactaggtgtcacatagttattaacagtgaccaggaaaatgaaaaggatagttacttacttatactcacatggttttcaacatgtagctgtttgctacttcgtgaggaaggctggcaaaacttgattggtccattgtacaaagaagacaagatctggctgcctattagtgagttaaacagggttatatccatattagtcagtcttccatggtcatgttctctgaacccaaaatgacacatacattggagaggtgagatactttggaaggattagtgttccatctatagactttgaattattctggaaaatatagtatcagtatagtatcatctgtaggaatcctccttggtgtagaagtacttgcagtgagatgatgaggaagaggaagaagaggaagagaaggaggatgaggaggaggaggaagaggaagaagagaaggaggaggaggaagaggaagaagatgannnnnnnnnnnnnnnnnnnntaggaggaggaagaggaagaagatgagaaggaggaggaggaggagtagaaggaggaggatggtggtgatgataatgaccgagatagtagaagtgacaatactaacaacagcatcactttacactgggtgctatgtgccaagcactacattgtgcattttccgttcagtggctttgtgaatttaatgacattacaactgaattcggtatctacgactatccccattttgtagacttgaatacacgaagccacacagcaacatcaataaaaggaagagaagtcaggcagtctgtatccagaatccacgatgtcacctgcacacttctcactgtcagcccatgttcttgctgtcctcttcaacacctggaccacccaattctggaccccagctgcgttataatgtggttagattttctaagctggaacaaatgttcccgatgccagttcaatgagaaattctgctccatgcttcctaggttacattgatttattcacctcggatagaataaccatgtggtgaactagataaaatatttgtaccattgattgctttatttcacacagatggcgggggttgggggggggggagaggagggcagtgaaaaagtgctgtaggcaggtgtgtagagaccagctaggacaggaacccaggctgccagtgcccccagggtattgtctgttatttgcaggtctgaccctgactagccactggctgacccctctggggttccctttgacagctctagttacagtgaatgttagctattgaccagggcatttttggctggagggtacccagggcatctcactacagaaggatatagccctttgcagcattgctacaaagtcacatagaaaacattacaataaagtgggtggcttcctgttcaccaatcactcaataacatcagaacataatctagggggaaaaaagaggagaccaggttaagatcgggcagattctggaatgtgtgtgtgtgtgtgtgtgtgtgtgtgtgtgtgtgtattcaaaccatgggttttctccattgatagcctctgggatgttggataaggctataatctcattgaatgtcagtttctcatgtgagaagtagcaggctgaagttagagttgcatgtgacagcgtatggacagacagacttgtatttggatacaagtaactgaaaactgacatgaatggctgagatgtgcaagggcttaggttttttaatttatattttatatttatttatttatttatttatttatttatttatttatttgtttgtgtgtgatgaaaattggaagatgcaggtttgggtgatgttggttcagcagctcaaccatgtcatgagcactgtcaatgattctcttggcttttctcccaccactgcaaagtggctgcagctaatatgtcctggtaacatgtaggcaatgagaggaagaggtaagaggtgagtccatgtggaaggtaagatcctggaagtgacccaacagcatcccgtacagccacatgaatcttgtggtccacaattgcttacttctcggttcctgagaggcagagtggatggctgcatggcttttaatgtcagtagtgaggcaggaggaggcaagttgtgtgggtaggaggggtttgtgtgggtgctgccatgaggggatggggggctggttggctggtatgtggtgggtgttcctttccatgattttggggaagtcgtcttgaggaccatgatggctcccacagatagctataacacagggaggaggtgaggagttctgggtatcttttaaggtgtttccttggcagtctgtttttgcccatgtgtattaggaagcctatgacaaatgacaaccagtcaaaagaaagggagaaggaaggtgattgaccaagtccctggaggactttgagtgcaggtgtggacagaactaatttgggttagggatggtactgaggagtgtagcagacatgaggggatgtggagattcggtgggagatctagaatcatctctttgtggagggatgaggattagaaactagaggaggagtttttccatctctttttggaagcaggagtgaggacagggtcagtcaagaacaagatggcacgggggacccctggtgctgccaccaggggtcatagtttataggattagataagtgggacctttgagggatgtctgtcgactagaaggtgggggagaaaaagtgtggtgacatggtgagagtgacctctgggttaccaagtgtaatagctaccgttgctgtaacaaaatgccagggacaggaatatagacagtggaagtttacttcttatggtcctgaaggatggaggtccaagctcaaggtacttgcaatgttcttttccttcgagacaactggtgatggcttcctcttctctctctttatgggggagggacattttctctccttataagaagatcagtcatacagagtaagggtttaccttattttagttaatgactacctcaaaggccctgttctcaaacaaaatcatatgttaagcttctggggttccacacaggaaggttagtgacaggaaatagtgtggtctgcttgtttgtctttggttggttgttgagacaagagcttgatctgtagcccaactaggtctccatcttccagcgttcctgctttggctccccaggtgccagcaccatgggtgaccgttactatacctatttggaaatgcatttttttaaagtataggagagctgtgattgagggaagaaggcaagttaggggggagtgggatcaactggatagggaggtgacccattataaaggagttggaagagaggaggtgagggccacacactgaagctggtatttcctggaaggccaggctgtacagctgtgcagctatgggtctagcctgatagcagattttcaatgaatgaaaaggcatccgttatctctacagaagggaggaacgtgtgaaagatatgagtttgtagttacatgttcatgctttggatggaggggaatctcacaccctatgtcccagatcctttcagtgatatggctggaagagctccccaggcggggcaggataatagtggaacaggaaagacaaccatctgctgacgtgagcgtggtccaaaggcagtcacggattcagtggaagtttgtatcggctgcaggtgcagcccagcccagagttggctcagtgctctagtgtgtgggaatcgggacaaggtaggcggacaacagggaggagagacttctgagcatgggtacccttcacccctggatctgtttgtgtcctaaacaatgggaggtaactccaagaagtagaggttttgagtgggggtcccttctgatttgtgggttgtcctactatcccccccatgcagctctcattgttgagcatccaagagggctgacttgtagcctgctggtggtctgctctttcttacaaagccacactatctagtaggtacttctgaggtcctatcttggtgacgttccagtagttgtggctcctgatctctttgcccatcagagagccagcctgagcccagtatttgctatgagctgtatgtgtgcagatggtgtctagaggtctatgtatgtcaagcgtcttcctggattactctttatcttgctgtttgggaagggtcttttgatgaacctggagcttaccatcttggcttcaccgccagcgccagggatccagctgtctccggtctctcactgctgggattacagattctaatgttggtgctggaggatcaaactcagattggcatgcctgtaaggagaacactttactgacggagccgtttctccagccagggttttgtttttgcttgtgttcatatcaaagatgctatctctcaagcaaaactctgactcatgttgacaagcaagggagtgagctcagagctggggatctagtagggtgtccctgatgcagcacccttcagtttcatctagagtcatttctcctgaacacgctggcattgcctgcccccaacccccaggagtgtggtcagctagccactgctctctgccaaacactatctttcttgtatctttttggtgctctcttgtatttaaatgaaaagacctccctaagtactaagggagaacaaaatggagataattacaggaaaaaaaaaaagaaagcaaacactatcaaaatatagtcagcctttcagagtgctgttgctgtgacaccctgtcttccagagagtttaattctccagctcgccctacacagccccacggctgctttgcctttgagatgagggctgtgtgctcgtctgcttccctgcccacctccacagtgtcgggataatttatggagctgcctctctgaagagactcaaggttagcaccaggccgggcttatcaggctcaccccttcagcctcgagtcattcccagtaggcacctgtgctgtgtggtctgggataagggtcgtaggcttgatagcaggctgaaagtcacggcgatgtttgtggcagcttctgatgattgaaatcttggtacactccaggctctgctgaatactgtatggagatgagcttcaggagcagttacacttgtcagaaattgaccccaccactaactccctcccgtgggctgatagggaaattgaggctcagaggtttgctagtccctcagctgggctataatagagtgtttggacccagcttgttcaggccccaaaagcatgaggattgtctgtgtgccctggtgtattctgtgcttggaagcagagctttctagatttctccctacttggtatccgacctcagagtctgctggccaacttcccttctggcctcaactttccttctaggttaaggtttgggctctggaattgtaggaatcaccccatcacccccttttccatgctctgcacttgggttcttacctcaagcccagtgctcacacagggcccttcccaccttgtcccacttaggacaaaagtccagactttggacttcatagttcctataccaactttgcagtaacatccttgatcaccctgggtcagaccctgtctccagcttcagggtgccatgtgagcctcctggctcatgtgagcattgcctgggggtcagccttgtgtcctgttaagtctgcaccttggaggaacacagggatgagtgccaccgggttaagcttacccagttttcagtttcatagcccatgacctcctgactatgctccctcagtgttctctgtctttgtgggtactagttttatttcttgttcccactctgagtcttaactcccacttttctaatgccagtgccactctctgctcagcacttccctggaatactaagggtttttgcttttgcgcagtagcccatctcttcctcctagcttgtggtccagcaaagctgtactatttacttgtcattgagccaaaattcctaacaagaagtgacttaatggagaaagggctgatttagctcacagtctgaagagagacagtccgtcatagctaagaaggtatagcagcagaaggttctgcggcaatggcagtgtgcagctgggactccttatctcctctcaccttggggacaagaagcaaagatgggacaggcagcaggactaggctataaacttcaatacatatccctcctctccctccagcagcccacttcccctggttagagtccgtttctcaaggctgaatgtttaaacacacgagcctgctggggaggttggttctcctgtctgagaccatggatatagggtagtagtgctgcctgtgtcacagttgctcttatagaagcctgattcagtcctgcttcaaagtgtcagggtaaacgcacatcctgctttgggaaacatactgcacaccagcccccgacttcacggcttttaccatcctgtccctgatgcggtcttttgtatgccagctgctccttcaacctcatcacacgtggttagagatgagctttggggaaaacagagcaacggggcagcaggtgcacagctgtgaccagcactcatgcttcgccactcaggcccctgagccctctcgggtggcttcgataggatgctttgccctgacaagctgatcaaggacgttctactaggttgaacagggtaggtcactgtaggccttgggcccatgtgctgggggtgttataatgggagctgctgacatctgctttatgctgagccccagcccctcccacccgcagctctagcactggagattaagggaggcaagtgatgtctctctgcagctgcctgccctcccgccaacctccttctcctctcctcctgttcctcccagccttgctccccgttcctcttcaccctgctggttgctcactgaatgtgagttcagcagacattcagtgaggtatcccagcatcctccaaggattgatcctgtgtgtctcacagaagctctttagtctccctcaaccattacctgacagtgggatgtctgttgagccatgaagcctctctccctagatatgattatctgttgttgctatggctggaatgtgaacctaagagttcataggttgcaaagttaatggcatatgtggcagtgttagaggtagggcctttgagaggtgatgaggtcacaaagaatcttctctcatcaatggattaatactgttatcaaggaagtgggtccattatctctggagtgggctccttacaaaagcatgggtttggccctttctgccctcctacctctttcttttgtacattcttgcccttttgccttctgtcatgggatgatgcagcaagaagacacttcccagatgctggaaccctgagactggactttccagatcccagagcaatgagatgtcaaagattttctaaattacccaattgtggtcttcagttacaacaatgtggagtgatgaagacagctgtcaataacggcacttagctcacgggcggttgtgtacagcatctggcactccatctcctggaagtgggagctctggttactgcttagaattactctttttaggagcaataaagtatgcccaagggcccatatgcagctacctttggatagcagtaatggcagctttacacagttcaacctgacgctgttcatcttaaacaacctaaatgtttgaggcaagtctttgggttctgtgtgtgttggttttcctaactatttaaaggctagttcgcaggatggctaccagagttatgccaaacaggactggaatgtgctttgtagactgaaagggataagtaaaatggacacttattttattttttaaatcattatagttgtaatgttgaaaatctgtttcatgtgtggatgtgcagcatggagtctgctttagtttgatttctctgcctgtgacttgctagtgacagctctctcttcgtgtctcctgatctgtaaaatggggacagtaatggtgcctacttcgaatgcatcttgttgagagccttgagtgtgggtttcatggcaggcgagcccaggaggatgtagaattgtgagatgtcattttgggaggcaggatcacaattgattcctggattacagggtctctgagttcagatctgtgttctaattgcttagcggtcagccctggcagctccccatctttcatggggtgaaaagtttacttcccggctcaggcttctatgggactcctggatccaagagattcagatgtaaataaggtgtgcaagaaaccgcccttcacagagggatgctatctctccagtgccacataagccatattgataaattaatctcatattgttgggaccaaacagccctgcaatttttctattgttcagcttaattggtctctacagctgtgtcattagcttgaattccttgtaatctagtcagagcctggggagccattgaataagatactccgtgacttctcggtttacccagtcgctggggtcgagactcagtattcccccatcttattcctgactccccattaagattgcgagctcttcattgaagacgtgagcacaaacctggcatccattcttactctctgcttccctaacatgttttaaatctcttaggctttactgttttaatttttgttcattttaaaacaattttatttttttaaaaaaagatttatttatttatgtatatgagtactgtgtcttcctgtacattctgcatgacagaagagggcatcagaaccactcatagatggtagtgaatcaccaagtggttactgggaattgaacgcagcacctctgtaagaacaaccagtgctcttaaccactgagccatatctagagaccctctcataattcactgtaaaagaataaaattctagtgacatcagaaaaatatttaagataaattattaaatgaagttaagctagggctacagttgtctacccacctacatcttatccagcaagaatgaagacagatatatccctagtgttagccctcaggggggctattttgggggaaagatgattgttggtgactttgatattctttatatgttttcatttgcccccaattttctacaatgagtctgtctgcttttcaaactaggaaaggtgtgattgaacccaagccacctggggtcctctgagatagttgatagtttccttatttgtaaaatgaaagggttgggctaactttctgttttcttttggtatccagagaactgattagaaatgccccatcccaagggtagaaggacatacttgatactctagactggggtccagaggctgccaaatgtcacacagataagggacagagcctggtttgatgccgcttctatgtgcacaacatggtgtttacttgccaggttggtggcctttgaagtccctaatgctcttctaggaagaaggaaccaggaatcttggctccttctaccaaccagccatttctccttccctccagcaggacctctgacacagggatctcttgagtgcactgcccccagtcctgtagcagcccaggcatgtggcctggcgtcatggtcccctgtgtcatcctggtcctccctgttaccctggcagttggtatatgtcttcttttcctttcctttcttttactttattgcattttggtcttctgattatatcttcctttaaagcaaagcccatttaactgtagtctgatttactcagggatttctgcaggcatttgaagctctcccctctggatagtaaataactttccagccagtctggtcgaagcaaggaaggtctttctgggttggtatgcaggttttctagagggggctgcatgaccttgggccttggcttcactgtagcacaggtgcagggaccatggcccaagctgatatgctacccatactgtctggctggctctcagagggcttcacggtgtgttatatatggcccatttattattcttttattctcttctttccagtgctagttattaaacacagggtcttatggattttagcaagtgctacatccccatctgcttttgcccttgtcaccttaacgcttcccgaagcctgtccaagtcacctactccaggagctttggttttcctgtgggacacattgctttgcaaatactcttccagagctgtgctgatatgttctggttttagttgactttgttcagggctagtgtcagcatgcagaatctggcccagtgggagggacacaggcagtcctgtattctgggcttatggctggctccattactgatgtccatgaaagccaggaggccagaattctgtcctgaaggcccagtccctgagggtgggtgtggattctgggaccccatcagtgcggcagcattctagctgcttcctgaagctttctgcctggcctgggtctctgggtatcaggggctgccagttaccaagcatcagcacattggtggctgccacacagctggctggagaagagaaagcttaattggctgtaggtcagagagatttcagccctctcttgtctgtttccactggcctttcttttctgtgatacggaaggagagagtctggctgggtcagtgtgcttccttctgtgcctaagccgggtgccattccacataggagtgtaccaaggtcctctacagcccttgttccacacagagctgtctgttgtttacaaatctcccatcaatctgtggccaagaggttgtctgctgtcgttgctagggctgttgctatggcatctgtcatgcaggctccaatatgagagagaccaggtgggtgatctcatgtccttttaggtacagatggtcttccccactggtaaggggaaggcctcactgggcctataggctgggctacaaacaggtgcgtttagatgagaatgaagaattagtaggctagggaggctcagcattataggcccagagcccagaagagccagtatggagcagatattataggggtatggcagatgcaggttctggggatggtggtaacatcattaagcttttgggcaccttgggagatggtgatacacaatcagaatggccacctctacctgggaatgacatcttttgcagaccctaggccctgccccagactgtgatcctgagccagaggcatgggttctttctgacacctggtggttaaaactcagctccattctgggctgtttttgagcaagaactatcagcccatgtttgacagagaaggaattgtagagtagaaagacccagtacgtgatgcaggctccctaagctaatatgtggcagatatggtctaagtccaggtctgtctgggtccacagcttagatcttcctcatgggacagttgctgggtactttctctttggcaggtttctggggaaaccatgtagaagtgtccacaagagacctctctgtggtgctctcctttatgctgaagccagatggttccactttacagatattgtatcatgtgaccagcccagagacatgaagtgagtcaggttaaattagaaatggtttcttgaaacacagctatccttggcttgtgggaacagagccctgctggagctctgagaactattcaggagaaaataacactcctatctctcatgtggtttttcccaagatggcagccattggtggcttgaagagtttgcatgagatttttcttcacctccaaattacagtaaacacacataacaaagttgactatcgttaccattttgtttgtgtgagcagatttgctatgcgtgcgtctgtgaaggccagaggttggtgttggatctctctctctctctctctctctctgtgtctctctctctctctgtctctctctctctctctctctctctctctctctctcttcctctcttcctctccctcttcctctctccctctccctcccatcttcctcccccttccctcccctccctctctcctccctcctcccctatgtgtcagcccctcttgcctactctttcttagactggatctctcactaaacctaggtttcttcattttgactaagctggctgccctgggagcccatagaatctgaatgtcttcccctgcctctgcccctggccctgccccggcactggaattgtagatacatgtcactattcttgggttttacttaggcactgggggtctgaacgcaggtcttcaagcctgcacagcaagcactttacccaccaaatttcatctggaccatttttaagtccagtcatggtaaagtgtatttgttgtgcttctagtctccagagttctttccatcttgtaaagcagaaattatgcatatattaaataataacctcccctctcctctacatccctccattccctggcttctgtgtgtacagatgcctcatgtaagcagaatcatgtaagaagtctttttgtatgtggctcacctctcagtaccacgttcttgagatatagtcacattgttgggtacgtcaggattcccttcctttaaatggctacataataaatataccagtatgtgtgtggcatgttttatttatcttttgagctatacttggattgtgtcacctttggctattgtgaatgatgctggctatgaacatgggtgcataggtacctctgtaaggctgcctttaatttggacacccatccaaagtagaattcctggatcatgtatgctttctcttaatgcttttgagaatctgtcacagggcttttcacagaaactgcaactttttccagtcttaccaatagtctgcaggggttctggtccctccacatcctcaccaacacttgctactctctcctttgggcatcatgtgtgtggggtggtgccttagatgggttgtgacttgtagcttctactgagagagaccatttcacaggccatcaaacttgctctttgaacatatgctgacttcaaactctcagttgtggacacagcctcattctcccgagactctggagtcctcactagatccacagtccttatgtgaaatgatttgaagatgacagacatgaggggttggtggggaggacgggactgcatcagccatgctctagcagaggaatgaatgcgtattgcctacactcagcgagtgagtgaacagggagcagagggtgtagaaagggaacaggttgccggggatgtgcttgcacagggcaggccatctcacttcggttcattcccggtgccagctgctctcttttctcaacacccaagggtgatgctctgtttgaatttggatttgtcagggaagctgtgaacaaattgggatgttttccctccgatgagcttccattgccaaatttcagaatgacttctagatgaaacgttagctcgcaaatacaccgcttcttgggtgccaggcacatggggcaggaggagcggtaaggtaacccagataccttgacaaagtgacagtttccttcgcccaagaagagctctggattaatcagctgtgggtctgtgcgtgcctttctcaaccttcaggtgtcaggagcagggaatccttctaaatgctacctttgtctcactttgttggtgagtgtctgtttgttttcactgtgtctacatggcactcggcatgggtgccacccttgaatgctgacttgccagtggaaggcagacctgcacccctaggcccataatgtcaagatggcagacttgtactcttcctccttagaactggcatagtgaggaagagcctctcacctaggagagaaagtgcccacttgtatgtctctcaaactttgctgactcttcaatggtttcctggaccaaagagttcctcacagcctccatatcccttgaaagaagcagtatggcttaatgactgcagtgggtcaaatattgtcccccacagttcacactcatgtggattcctttgcacacagtgtctttgcagatgtaggtacttgagatgaggttgtaccatgctgggacatgtcccaaccccatgactggagtcctcattaagaccatttgaagacttagacaagccaataggatgcttgaactgagactgaagtaagacatctacaagtctgtatgggaaggctggacagaaaccacaaggagatgctagaggcaagggaagttgctctacaactctccgagagaacaagaccctgctcacaccccagttccagactccttcagaattgtgagatgcactcttctgaccagcttgtgacacatcacatggcagcctcaggagcccatgcaggattctagggacatggatgcttggctatggatacctagccttatttcaattcccatggagctgagtggccttaggggatgctcatcgatcccttcaagtcttgttttcatctctgacagagagataggtattttcttacagggctgtgtgagcattgaagttactcagtgaatacatggcatttataggacctggcacacaggaagcatttagcagttgggattgttattgcaagtctatttacatacttgcctctgaacccagagctctctttataccaagtgatgctaagtggtcaagttttgtgtctggctttgcagtctactgaacttagagaaggcaatgtgctatgaggtatgtaggttactaggcacgtgggctactaggcatgtgggctactaggcatatgggctactaggcatgtgggctactaggcatatgggctactaggcttatgggctactaggcatgtgggctactaggcatgcgggctacttgccctcattttcttgcctttgtcctcatacctccttccatccaattcagattccaaggataagagataagagaagttggaagttagataagaggtaaaggaagcttcaaagcatctcaacatagcccaggctaccctcaagagcctttgaatttcttgttctccgccttcaccccctgagtgctggtataagcacatgagctgcatctggtttgtgttattctagagatccaacccaggattccatgcgtgttagacaaggaccctaccaactaggctatactcctacctgaggcagctgtcttctggccaggaaagaactgtggtgctttgagtgactcagacctggtggaacccagtttctttatacatagaatagaaatgatcatcagaggcctgtgtgaacatgctgggaagtatgagaggaccctaggtagttgactggtaataaatatccttttgttctttgccatatcctgggaatgggaagggtctggatcagaatgacagccaggcaggtctgtgttggaaacaaatatatccatatgattaatttgtaagtattttataacttattcaccttacatattgctcacttccccccttatgatcacccccttccacatccctttctcccattttcctctccccttctcctatgagcaggtaggaacccccttgggtatcctctaggctcatcctctccctctgaggccaggcaaggcagcccagctagaaaacatatcccacatccaggcaacagcttttggtatagcccatgcttcagttgttcaggacccacatgaagaccaagccgcacattcagcctgtggatgggaacagaaatatttttactatggcctgaacttagatggacagagccaagtattactgttgtgatgtcaagtgccttggatagggtctgccattgccctgccttgctttcatgtgggtgtttgtgatgggatgttcaggatttctctgagttagactagtgcgaggttaggtttgctttgcacctcaccccatgcagggcatcagctttcccactagattggcttggtatagaagcctctggaggttcattgttatcctgctcagcccaagacagttgtaagagtggagcacactacaatgcaggcagcaagggtctggtgcaggaaccaaaataacttctccaaaaaatggtaccagcctggggttggggaatgctgcagccaggcataggtcccagtgtgacagcacaggtcatcaacagagaggttcctggtacaccaatgcccacagtgacaagagcaggcatgacctattacctgtctattgtctaaagtgtggattgaatcagtgtgtgaagtgtttgcatgtgtcaaaggggtagggtggaagctctcaggggcctatcttctcagagaagataggaactgtttgagcttttggtgagtgctacatggctgtttcgttgggattctttgcgtttgattcatgtgttattttgggtatttagaaagcaatgcatctgggctgtattctcgtagctttatcctacaaaattgactttattgaattacagtttaagtgcgttcacgatccatatagagttgattaagaaaaaagaccaaaaccactcatttgaaagcacgtttctttctattgcagggatatagaaaatacattttccacaatgtcacacaccatcttcttacaaggatccatgttatttagatgcccttctggacttaatgacagaacaatgtttatttctaccggtggcttcatgtaacagtttttttctcttttcactttagcggccagggagtgtctgcttagtgcttgatggcagggcgggctcctcatgctcggctgtgagcatgcacttctttgtttcactgtagtggtctattttactttgatcctcccctccgcttttgctgttttatgttctttcaaatcctttaaagacaagcagaactccaggtatgtacatgaaaaattaaaaatgtgtaatcaaaccatagctcaaacggagtgtctatagcagcattattttaaataataagcgaaaggtgggaaaacaaatgcctgttacctgataagtgcataagcatgttgtattttttttataatggaatattattcaactgtgaaagggaataaaattctaattcatgctgcaaggtggatgcaccataaaaatgtcaattggtcacatacaccagatacacagattccactcaggagaaagactcaggatgggtaattctagaggagatgggagactgaatatttaatgtatatgggcttagaactgatttggagctacaaggaagtgtttgaatggcattgagaatgtcttaaatgacattaaattaaacaccatgaagactaattttgcattgcatgaatgttgctgcaataaatacactgcatatactgcatatatacacacatacatacatacataataaatacatacacatatacatatatatatatatatatatacatacatatacatatacatacatgcatgttcacacacacacacacacacacacacacacacacacacacacacacacacacacaatgatggggttggagataagatgtggctcagtggttgagagcactccttgctcatccaaaggacctggttttgatttccactattgacatactagttcacaactgtctgtaactccagtaccaggcaatccaacaccctcttctgtctaagcaagcaccaggcatgcatgtggtacacaggcatacatgcaggcaaaacgttcatacacatggaataatattttcaattataaaataattttgtaagtgattataatagaagtgatactttatctataataacaaactccctgaaaatctgtgttgggcccctgctagcttgggcagaaggggcaaccccctcctctcattgctcaatgtctgtcgcaaagcttctctccattgaagatggccacagttccagcgtcatccaaggccacagagtgatagtggctatactgagttgttctctcaggtccatccatcatggctcttgactaagggggtgtgctggaagagcttcccagtgccggctgtgtgagaatgggcttcagctttgtatgtggcttccacacaggtgagctctgaagcatttataaatgacttagttctcaagagaagttggcagggtgtctccagtgtcactgcccagatgagctccctctggctggtctggtcagttcctaaccactaagtgaaactcaagaagggactttaggaactgcacaagatcagaacacacgatcacacgattgcacctctttccttttctttttttgaaaacctgggcctggggtggtttggggcttcattttatactgttttctcatcctcaggatactactttggaattaacttctcctttgactttcttccctcctggggcacctaggctactggtgccctcaggtggtctacttcaccttggcctttctaggccaggaggagtctcttccttagcatgggtcccctccaatactccccctctcccttaaagcagtgcaccctgagttttggtacctcactgtacatagggaaacagatcctggtttagcatcataggaagaatggaaagtatttgcaagtagaagtagaaacacctgtttggaatgcctcctcaggttctgaagtcgtgagatttgctctaggctaagacagtttcaggaagaggaaagagatgaaagacatgctcagcagcttctaccagtagtccccagtgaacctatgatttgtctatgagtttctggttcctgataggcagtcctccttttgttcccttagcaggtgggctccttgcagttgctttctctggattgtattgtgttacatctggctttatagcaagtatactatgccaccagtttattatcagatttcctccagataatactctttccatttttttctgggaagactctgataaggctcatggttttgctgtaacaccagtcagtaacagaaaatttgaactggggtttggggagatggctcagtagttaaagtgcttgtcaggcaaggacctaagtttgatccccagaatccacattaaaaaggtctgggtgttgtagcatgctcttgtaatcccagtgctagagagaagacagggagatagctagagtttgctggacagccagctttgctaaattagaacattctggataaacatgagagcccctcttgcaataaacaaggtggagcatgattgaggaaagccaccaaggttgacctctgatctctacacacatgcaatacatgtacatgtgtacctgcctgtgtatacatgtaccctttccccatgaaaacatgcagccaatgaagtcaccaatgttttgcatgttcaccttccccgtcaagctacgggagcaccaagtagcttcttagaattcagaacggatagctcagcaccccattgcagtgaccaatttggaagtctctgcttattcacagaggagacaactcatgacctatctgaaaccacagacagtaccaaatccttcagatactctgttttcactagtcttacacactcatgacagttttatttatgaagatggtacaaaaagagattaccaacaactaatagtaaactagaacaattatgaccttgtactgtactacattcaccccttatactgaggagggatcatacagttcctgggtaacgagatgcattgagatgcatgatttagggattgttgatgtgttcgctcaacacaggagcacggagactgagcatcatgatgtggtcctgagacagtcgaacccataattcagagagttttgaaatgactgtcaaatgtatagcacatctgagggtctggctaggcaggtgccagtcagtatctgttgaatgtgatggagccccgatggtgtaccaagcaggtagcaacactttgctgtctcttcactagcagctctgacagtgtagcatggaggcatgtgtgttagggggcttctgtcttcacacctgagcagaactgacatcctgcaggaacttttagcaccttctgtggtacacacagagtgaaaaggaaaaggtttttcttggaggagataatggcttctgacaccaatgtaaaatctgatagagcctgaatgtgcagttggctctatgaaggatcaccaagggtcaggtcagccagagatgactttgtggaccatgtaacatctgaaacaggctgattgtaggataagtagaaatggtcaaacttgactttcctccattcccacagtgtattacactttatggtgtcgtcccccgattggggactggtttgatcatctaaagaactctggaaaacagagcttctaaacactagctttttttttttttgagacagggtttctctgtatagtcctggctttcctggaactcactttgtagaccaggctggccttgaactcagaaatccacctgcctctgcctcccaaatgctgggattaaaggcatgcaccaccatgcccgacaacactagcttttttaaaaaattacattttattttgtgtgtatgtgtgtgtatgtgtgtgtgtgcatatgcactcacatgggtttgtgaagatgcatgtgagacataagcatgcatacagaggacagaggacaatttgtgggactggattccttcttctactatgtggatcctggtcatcaggtttgatggcaagcacctttatctgctgagctgtccagacctttataattgtggtagaggagtttagcagagtgagagaaaatgcaaggaaaggcatgaaacctggaagaccaggttgttgacagcagcaaaaggttgtgctccagagctgggatcctgggtgatcaagttagtattctagagaggggagtttgcacccaagctgcacattttgtgttgaagattacccaccctctgaaagccttcatttagagcaagaatgatggcaatgattcattgcaatgggtagaatcaaaataagactactaggggcaaatacatcccgtggcatagagtgtagttctcattccaagttggagtccaagctataatgtttcaaggctcacatttacatagattctgtgtctacagctggtaggtaaaaggtgtcttagtttgggaatctcttgaagagattctaaaagagtaaatccatggatggcacatttatagtttgggaggaaatgtcaggaagtccacatgaagttgtacagaactgagatagagtcataattaggattctatggctgtgataaaacaccaggactgaaggcaatgtggggaaggaagggcttattttagcttatgcttactagtccactagtaagggaagtcagagcaagaacgcaaggcaggaacctggaggcaggagctgaagcaggggccacgaaggaatgctgacttgctcaccataacttatgcagtctgattccttatggctcccaggaacacctgttcatgggtggcattgctcacagctgagctgggcactcccatatcaatcatcaatcaagaaaacgtaccatagggctgcccacagaacaatccggtgggggtgttttctcaacaaaggttcctttgccccaaatgactcttggttgtgtaaagttgatataaaacgagacagcacagttaggaagtcataggggtgtgcaccacagtggctgctatggtgagccagctagggtttattcagaaagaagctctgtggagaggggaggaagcaggacctcagggatatcccatcaagtggaaccatgggaaaaggggtctggtttgtcccatgatcctccataggggtcctttaggtcaagagatacagattctgagtattgtacattacctagcatcataaactaggaggagggtcagcagtgagacccacctagtgtctatgttaggaagttcttatgttgtaatctataagatcctggttgctcagagattcctggtagccatttgcaagcttgttacatagttcatgttaggtttcctctttgcatctgtggggttgcaccttggttctccagaggttggaaagaaacagctgggaaaggcagagagaattaataaagagagatgtcaattacacatgaggttgggagacactgagcaaggctgccaagttacagactggtgggaaagaaagtctgtcctgcctccttgccagggtgacagtcatggcagagcacctgggaggcaagaatcagaacaggaacaaggtactgactggaggcagctggggaagaccattaaggtatgtttcaataaatccagccctacagaggatactagaaggaaaactccaagacatggaggttagctacacccaagaagacacaggaaataatttcatgcaagcaaacacacacacacacacacacacacacacacacacacacacacactaccagcaccaacatcaaaataacaggaattaacaatcattggccactaatatctcaatatcaatggactcaattcaccaataaaaagacacaggctaacagaatggatgtgatggtggtgggagttttttgtgggttctttagatttgaactaaggtccctgtgcatgtgtggcaaacattttacacactgagccaaatctccagctcctgagataacttctaaatgcctagagatttcattgactgattgatttgtgtgtacccacttgtgcattcatgtgccatggcacatgggtggaggttcgtgggtaacttgcatgagtcaccttctcttcttctaccatgtgggtcctggggattgaacgtgtatctgagggtcatcgggcttggaaagcaagcacctttacctgctgagccatcttggcattccccaaatagttattttttttaagttagcacttacagaaagtaatagacttcattatgactttttttcttaatgctcgtgtgccattattcatctttctccatcactccaattcacttctccagatagcgcctattttaaatatcagttccagctctatgacaggggctttgcaacctgggaaagggatcccaggaaaggatattatgaggtagggacacctgggatgagttttgaagaacaaggagccaaggagcttatatgtcagccagcatgtttttctctgtcctgttttgtgcatttctgtcctttcacattgaacttcagcctattcctagaccttggacagctcttctctgcttctggatggagctagcttctgctccactctgggactccctgtgtggtctaaacactctcactgagctgagccgagcaccgaagtgcaggagacaggaggacaaacaaaataaatagaaggcatccgtctttgttgtcaaggaatttttgctctcacgggggaagccaggcaaataatatcgagtctcacaggtgacaggctcgaatacgtacatcagcagccgcacagaaataattccccagtaattggagggtgatgctgggatcacggagtgactgcatctgggtggtgatgggtggtttgataaaagcttagtggagaggatgcatgtatgcatgtatcagaagcccagaagatgttcagccacacagacgctccctggcctgaaaacctaggggctgccaggagtaggagcatagctctaagggagcataaacatatcagatctgggcagcaggtgtgtctttgtctagcatgtaaactggaggctgggttctgagtgggggaaaatgaagcttggtagaatcggacatagaggtgactgcatcctcatcacagcctcagccactgcaagctacacacagaggcactagaatggttgctctttaccatcaacttaaatgaatttagagccacccaggagtctggggaggctctttccaaagaaggttaactgagaagggaatagctactctggatgtagatggtatcacccacnnnnnnnnnnnnnnnnnnnnnnnnnnnnnnnnnnnnngctgtgtgcttagatggaatggaaggagggaaagagtgaggccaggtgagttccagcatcctttccctgcttgaccatgaagaaaccttttgccacaagctaccgctacaatgatgtttgtgtacaggcccatgcttagtgcactgaactctctgataccgtgatccataccgccttcctcttttcagttgtttctgctgatacagtgacccaaaataacaaatacagtcattcttcctgccatagtggcccaggtccctgacttcgattcttacacaatccatgggccaatttcctttttggaagagaagataaacattgtttgaactctagcatattaaaggtgacatgctgggactgttaccagcactgtttaaattcatccatatgatgcctttatgagatggcactactgtttccattgtatagaggggaaagctgaggccacaggaggtgaccttgtctcatcagtggcaggtgagagttaagatcactgctggcaccaaagctcatcaaattttcactgtgccaatcttctttaaaaagtccagggaggaacaggctttggaggctcttggcaggctgatgtctctgttgacgtgagcacacctccctgagtagcttggctttcatgtgatgaaagggagagaagatagaggaaggagtgggagaagagtcacaaaagcctgtcgcacaagtcccatgacagctcctgactctcagcttcactgtggatctgcaccctagggaaccactgcagttgtgcaggtggtacacagagagctggaaaagctgtcactcccctccaagggtctacagctccttacatcaaagagtttccaacaggtttagagctttttaatagaaattctactttagtgagagagcaatttgtttgccatcagggaggtcttgagcctgccaggaacatgttcaatgttattttgagaaagtggagccttagaagagattacaatatgaagattagaagttgaagggtctgttaaaatatcactatatgcttttgagcataattgtctcagacacaaagattaaataaatgattagaagtacaaagaaggagatactggtgggacttgagtctgggaggaaagatgtcagaaagcctcttggatagatatgatttatagatggtactctcattgcccctctatatactgtgaccacggcagacatcactaattgatcatagtctgtgttccatattctactacagattcccgaattcagcagtcttgctaactcactggcattgtgctatgttagatttcctcatagttcctgctgtgctggtcaggaggactcagagaagtattggggagatttcagattttaagaacaagctgttttgttcatatttgctttctgaatttgaggggaatgtgtatagtgataacaagaactccaggacaggggacaggtatgaaggggacaggcatgaaggatgtagattcagaattggaattaatctctaattagtagtaactgaagccatgtgaatagagagaccatttccaaaagagtgaacatatggggaaaagaacagatggtttattgctggaggggaggaaaatggttacaaggctagagctggggagaaaggtcacagaacacttccttcacttggtgaggaaagaagcgcgtcttctcggcttcctccatggagcccttagaaacttcagcactactctgaaaaaactcaattccttccttcccttcagattctgaatgaaaaccaatgaatcctcttaaagcatcttaaagcttctggaacagcctccctcttgcaggtcgtgtgtatccctcttctgttgaggtctatcccattctgcattccacttatcattttttttttttttttttacctctttggcctgctcacatttcagcctcatgtgtgcagagcagagagccaagaaccgtgaatggcatcttgtctttctgatggttaccttgactaatcactctgacactttcaggttctgggataattattcttgcaaagtcaaggttccccccttcctctcagtgacctggaattaccctctaacaataaaagcgccctgagctctggagtgacttctccacattaactctgagacacagttgcagtgagaaaatctacccttttaatgggggaaaatattgccctcgtaagtctttatgcaatgcacttgagcttaatgctcacttaccaattcgcctttataacttccatgttgagtgaattaagtcctccatgcgggtagttattaaggaagtgataagtgctttataatttagtaaagggtggcctggccatttcatatttttctaaggaaattgaccacccaaaaggcagcgctcttagaacccccgagggcagctgatcttaggattagagctcacactgtcacatccctttccaggcagctgcttgtgccggagtgagactcatcttttccttcaggctttctcctccagggaccactgaggaagaagggtcagagtcagtgactgtgctctaccatgagctctgtccatcctttttctgtcctggttcaaagctaagatgactaacagggtctggtgttgaatgacccagtttactcttatctccacagaggagttcactttcctgggacacatgaattccagcctctgatctcaatgcacaagcactgttttgttcatgtttcagtctctttagacagctggaaaagatgctgatgcccctgaagaccttggtagccagagctttttcaagatttgatgtagggtcatcatgttctgagcgggaacagtcagttgtttatgttttctgatacatgccagaacctgggctgctttaggttgaacaagacccaaattgtgtttgctttcctggaccttgcactccaccacaagagaaacactatacacaagaaactgcaaaagggagggattgtgactaccacgatgaagcgaatatgtagggcatcgttatacagtcttggtgctattgacactggaggttgaaaaaaaaaaactttgttatgagggattatcctgtgcactgcgggcctttacccacgagattacaatgccacttcccagtaaaggcaaaatgtctctaggcattgctatatgtttgcagagaaacacggccaccctggattgatggctattcatctagtagaaggttatagcaaatgactgttgctaggttggccacagcagccagtgacatgttaggagactctttagtgacatcttagctaaaggaagcagccaatgtaaaggccctgctggagggagggttcttgtggtcctggagaaaaggcaggatgccactgagggaaaaggcaattgagataagagggagctttgtttgagttggggatgaaggggtatgagtcacatcacatagcactttgttggtcttcatgaggtctgaattttatcacagctgtcaagtacagaaaataaaatcactggaagtttgagtccttgtttgtttatgttcaaatttatcatgagtttcaaaaatgctcatgcaggcttctgtgtagaagacggatttactcaagtgagtggaagcaatggctgtgttttggagagagtgatctttgtgagaggcaatggtgtatgctcttaattggacttactgacagcttagatgctgtgatggtgggcgtggtagagtttggtttgtacaactgaaggttgctgatgcaatttactgagacagagaaaactctgaagtatcatataagggctactattggatccgataaactacgatatgagagcctgaagtaagaaaaaggtcttgctagaggcagccattgaggcggtgacatcatatagatggcacttacgacaagcacctggctgagatcatcttggccatgagggaaatcggtgaaaagaagaaccttagggtaagacccagaagaatctggcatttagggatgtaagtatagaggatcaacaaaggaggctaagaagggaagtctaagacaggcatcaacccaggactgtgcagccaagactgccagaaatacagcatgtttcaagaaagagaaacaatggtgaagagtcggttggagtcaccaacatgagaaatgctggcagccttttcagtgtggttcctatagtgcagaacagagacaaatgaagttgaaatatcaaagagaggggaggaagctgggtctctgactgtggatgaatcttttgaaaatatttgccacaaggaagggtatagggcatgaattggtggctggggaccatggcctcagacatagactccagaggcagctgtgtatttgagtctttggaagcttcagggctatcttctttctgttccttgctccatgatccctcagagtccctgccatatctaagacattacttcagcctatactctaagccacatcgttcttaggggatcatcagggtaatgtggggtcagacttgagctctggtctactcaagggatcagaaatcagggccattcaggcaatcagcattgggaccatctgtgtgtggaggaagggggccttcatggaggcttttgaggtacgtatttaccctgcagcagcctccctgatttgagattctggaaataagtggaaaacaagacagatccaattgctgttcccatgcattatggttctagtgtagatgcctttatgtcaaaatgtaataaaataatcaaataagactattatacatggctattaaggccacaaaggagacaaacagagcttgtgctcgagaagaactggaggagagatgggggctgtgagcacagaggcgtagagggctggcttctctgagcacgggagacttcagaggagacctggaggaattaaaggagtaagggaagtactccctgtagaaggtcctggtgggaatactcctgcttcatagcagcagcagaagccaggccagtctggctggagctaacccaacaaagggagtgtgtccagaggaagggccccactggcatgctcatggtcttgcgtgccacggcctgatgcttgggattgttgtaattgtaaaaggaagccccggaggctttgatccctctggcatatggactgatgaaagaaaagaatgaaaacactggaggagattgaaagtggtggtattttggcatgaccgtaataggcaagctggggtcagtatgccacagcaacccaaatgagagcaatgggaacagagatgcagatagactggggaagggagaagatgtcagttagaccaggggttaggacagaagagtctggactccaaagagaacaggttgactggctggtaaaatctcactctggggagttaatctgtgttagtggggaaacagagggaccatgctcctcgatcttttcttgttagggcatagcacctcagcacctgaagagcacaggtgtgcacacatactttcttcattcctggcacgggctttggaaataatcaggaaaccagaacagatgctgtctctcccatctgttagccttaggatccgaatgcgcttttctgtatctgagggcgggtcccagatgtggggctggcttgccatggttcctggcacacacatgcttgtaggctggtgtgctaatatcttggcatgctggagtcaccatctcaagacaccctgctccccacatcccatgctcccctggctcttgtgtctggttctccaggcatccaatttcccactagcagctctcgagggagagagctggttgcttggctagtatgctctcaagcagttcctccccagaccccttgaggcctgaacttcatggagctgttgttctgggaaggtttgtttatagtgctaaacataacagataattgaaagctaagctgctgtctggatcacgaggtataatatggctagataacaaacaaatcaatttccttattgccccataagccttcaaagtcaaataaatgtatggcacattgtgcatatgtagaacctgacacacatgtgcgcgcgcacgcgcgcgcgcacacacacacacacacacacacacacacacacacatggatgtgggttctaatgctgactcattaggaagtaaacttggaggctcatctccccagcagccaacttacatttccggtcaggccccactattggaacaaaacttagtggaccttgggtttatctggagatggcctagagagaagagacatttgtatataaccttggtttttgaagttatttagttctgtgatggaggagtggggaacttatatatgaaaaaaaaaaaaaaaaccaaaaccaaaaataaacaaacaaaaacaaaccaccaccaagaaacaatgattttaactatccctttccaggagaccaagtcaagaatagatacaataaatgcaatgatagtgagcctagttatcaccagataaatatggattatgacttcacctcctggaaaacaccacttatatggaaacctcagagatctagaaagagaagggaaacaaagaagtatctagtgttcgtgtgtgtgtgtgtgtgtgtgtgtgtgtgtgtgtatgtgtgtgtgtgtgatttattttcaaattctttgaaaccctttccagatcatatttattcttagtgagcatacacttccatcattatcagtagcacaccttggccgtgtgcatttagtcttgagtcccagcacactcactgctctaaccatcataccaccaacttgccatagggaatgtgaggactactgaggcttgtgcttctggcctacagcatcaaggtccaagctctgagactgttgcctgtctaggccagactacctccatccatcagcctttagctactgtgttccaagaggctgcagaggagactagccacgatgcattgggaggaaaggggctgcttcagggcctctacatattaggatatcaaataaacaactagaaaagtgctaaaatgaatgggcttttcaagacggaaatcctatgggggaaaggccatctgaggcagggggatgagttctgtgcatttgaagaagcttctgaaggctttgaggtgtcagagcccagcagacatggttgctgtggtgtagggttatcaagagagtgtgactcaagctctgtgtgctgtcttggagaagtcagagagatatggtctgcattttagggagaggggaaaaaaagatgtagcaaggaacttgacaatgtgaaggttttacatttaaatttagttgtctggaaagtttgggtctgaagaacagctcattaatagcggtgtgaagtcacgttgaaaagaacagcaatgtgacagaaagggaggagagagaaaaggttggaaaagaggcagtgtggggccactgtgtctgcaggaagggtgagaccaagtccaacccaccaacttcctgcctggggagggtaccctgcctctcttgtgggcttccttgcaccttcttttcctctggttatatggcagcagatgtctccatgttctagaattttctggatagatgactatagacattaaatactgggatcataaaggaaacaggacatgttttttaaattaaaatatggaccaccatgtctgtaccaactaattttcagactcttggagaatgccaggtcatttccatattggctcaagtgaaacagaaagcggaaaagaaagagatgggacaaaacaccatctaatttattcaagcacaaaaggtccgtgtatcctcaattagtacttaatttatgctttgttgtattccagaacaggatatgaatcaggaattcatatcccttggtcctgggtctctaggattcagagatgctattgtgcattatggagaggggttaggtttctctcatgctgtggaggagttgcagtcacctcttgactatactctttccaagccatatcttatgagatccatcttgactccagtgggattttctgagctgcacccgtaagtcctgtgtgagtcctggagtttgtgttgtcttggacctccacattttgtcacactctttggaaaaggggtgttcacggggtcctgtcagagttttgcagtttcatgaagagacaatgtggaagcttaggcctggaaactgagatgaacgtgagagaaggctcttggcaggtagatctcattgataacttggtcatccccttgacttgagagggtcctgaaagccatcacttttgaatttccctctgagactcactggtataagagcaagccttttgttttggcccatagtgtttgatgcagagcagtcatttccaaaaatgacattttaagccatgggactctactagcttcgatgacaacttgggcaggtgctttatgtgataaggcaaaggtcttcctctcagagctggggatttctgggacacatactttgccaacaagggtctattctgtctgtctcattcccctacccaccagacattagtgttattctttccccagttgtgacaatcaaactgtcccctgggaggcaaaattacctcctcttgagaattttgctgtaaacttaataaagtggaaacaattgatataaagtgagggagagagcccaggttcagttctttggtttctcgctaccctctctcccttgctactgattggagaagggacacaagtagagaaacaggaccgtgggtccttatgggggccctaattgccatatattcttttatcttccactatcactgaaatctctttgctcctgaccctacagcaagctttgtgagacatttgtagggagagccagtttggctcctgtcactcctgcaccacagggtttacttaagtcccgaccttttaaaaatgtatatgtattgaactggaatacccagaaaaagcaatggacacgaagaaccccgtgtactggcactgggcgctgcctccccaatttggcattaacaaaaccataccaattgtagtctcttacctcatcctattcatttattatactttgaagagccagccttttccactgatacttgtggccttctaatagcagtcagcacagttaccataagtgacttgccttgtttggtaccaagcaatgagtcatagaagacttggcaggagccggccaacgtcattcgcaaatgtcaaggctgcaccttccctggcatgcatcttctctctcctgccctcgcccaccatagggattttctttcttttaaaagtcagtatatgtatatgtatatattcatttttgatgttgttgttgtataacctggtgcatgtgtgtgtgtgtgcatgcacgcctgtaaagacaacctagaagaattagttccccccttttcatcttgtgtacttctagagattacattcaggttgtcagactcaatgccaagtgttctgtacctggtgattcacaagtgctttctcgaggttgttttcctggaagtcacgaatgacaggttttctgtccttctatcctgccatgatgggtcattaaagtcaaagatgaccctactcttttgcaataaaaaaaaatctatggccaagaaaagacaacttctaccagaagcatgacgctgtctgtactcaaaaactaaggaacgatgtctcataaaatccccttagcttatgccttccagggacttctatgtccccagccctgaaagggctcatggttgttgttgctgatattgcttaccagtagtattttgtggtactgggattgaagttggggtcttggtcttgggtaagctagatgaggcacagggcttcatccccaccactcagccccttgtgagctcttcaagacacatcttcagttcccatgtcattgttatgaggcaggcagtttattacccccatttgacagctggtaaaaggaaggcacagacaggtgaggtggctgggacagggtgtgattggtggagcactcctggggctaggattagcactctggtgctgccttgctcttggcagggcctggcaacccttttccccataaagggccagaaagtaaatcccagccttgtaggccatatggtctgtgcagcaacgatccaactttgcaacttgaaaaaggctgtagacgacagtgaagagatatgagcaaagaaatgccgatttttatctagttctcacaggtcatgatgtatggttttcctttgacttaaaaaaaaacaaaatatgaaaatgaatcttagttttgaagctatacaaatgcagacagaaccctgacctgtaaccagtctgcaatgtggctgcgatactgctcttccctgattgaggagcactcggaagcaccagaggatgctggagatattatttaatgtactggaggtctccgtactgatgcttcactaacttgtcacttctcagtgtatgtaggagtcaggaagggtccatttataagcacagatcataaagactgaaacaaagtttcaggatgtagggactgacatctctgccaccatcaaaacacatttatgagatgctaataggggccaagaaaagtgatttcacttatttaaacaatctgatttatagctacttgttagaaacagttccatgtaggaagctgggcccccatgaatgctgtacaaacattgtgatctccttggtattggacatggcccatggcccggggagatacactggagaggcttagtggcacaggtggtcttagtcctcttggctttccttacatctgaaatgttgtcagtgttcctacctcggtgagaccagggcatgaaaactgccttgaaaccatgaggcttccagagagaaggcattagagttagaggccaatgccaacctggccacctggtcaatgtccccagcaaatgccagtgcttctggctgctccacgggggctcttggagaatgtgtttcaaaatgggctcttggcataccttgtcactgtgcagctctgaaatgttgccaggagttctggcagccacaggcacactgcctttttggctctagttggactgggcggcagatggcagaaccactggtgtggtcgggcaagggaggggctgtctggggaaaagtaatggtcacttttctggccagattgtgccttgagtaactatattctttaatgaaatggtgctgagaccttttatatatcacaacctctggttatggtggcgggaggagtcaggtcctaagagggttgggatggatcatttcctaggatcttctgctacctcatggaaggtcatatttcctacactattagaacaacaaaagggtcttggtgatcaacaacagaatggttttcaacttggacatgccaaaagcagcaatgaaggaatatttgactcttgtcactgtcaggaactaataaaaattagacacatatttatgatgaaacttctcttcataacaacagtcttgagtttctttgctttgagctgaatttttttgcactgggtggttgacactggtttgcatgtattgataaagagcttcaattaacagtgacttttttctctgatgaatctgagaatatgaattaattattacttaataaatatagtcttcttgctagacacaaccctctttaagatggaggtctcgagggaaaggcctagaaagagatcttggtggtgaaaagaagaggagttgaggtggtagggtacctctccttcgcaaagaaacaggagactctgattggttaatgtgcatgcttaatcttcattcaagtctcagagatgaaacttgagcctagttgccatggcaccctcttcctacctccccatggtgcctctgagtgccccatctctggagctgcttttctgtgcatttcaatccactggttttcttgagctccaaatggaacgaaccatggttatgcagactgagtgttcgtctgtgccctggtgggtgcatatgccacatatgtcttcttctttatcttgtttgcacagaagccatgcccttaggcaagccacaccccctccctaaaccacatcatttatattgtatttctgtgcaggcattaagaatatgaaagagtctaaaaagagcccgactttagaaaatcctgaatagaaataagagggaagtaaattgagtcaaaaatttgaagaatgggtttgaagggttctcgagctggggatagatgctaagcactctgtccttaggctatacacttagaagccatgagtccttcactcctatgtggaaccccaccatccagaggggagaagctgaactcagggttaattggtgatttgtcagaagtcatggctcatgctccaggcttcaagctcatgtctgactctaaagctggtatgccacctcttgctgtagcgaactgaccttttctgtcttcctgcagacacatagagaactggcgaggcctgcacacactcaatgctgtggacatggagctctacacgggactccagaagctgtgagtacaccagggtggcttgctaggagacaattgggatgctgcctgtcatccgaagtagtagtaatggaaagcctgctgtttcagtgtttcttctcatgaatcctttttggggatggttggcatcacccattttgaggatgttaggagccaccttggtccaaacaggcctgggggcttcccaaggttaggatttcaaggtttctctgctccaaggcattctgggaatgtgtttatccttcagctctgtgcttggcgcaaccctacactctatccccagccttagattcccactaaccactacagtggagttcagtgtttcaaacatgggcaaccaaaagtgaggagaaagaggagaaagcataaagagactgaagcctccttatctctggagcaccaggtaccctgattctcaattgctggttaaaatgggtagtggttagcacccagcaatgactgcttatatcccaaccttcacctagtcaacaaaggaattgggtttatatctctcattgagcccacatttggcaatctagggtcattagtaatgaaagggtcttgccttctttctggctataacccctgggtttatgctaatcatcttttttctctgttcaggaccatcaagaattctggactccggaacatccagcccagagccttcgccaagaacccccacttgcgttatatgtgagtagaactgaaattttggagagggtgacagggtacatgcaaggaaatagtcctgaacgatgaagctggctttgatatttgttgtccttggccaaatcctttaactttcttaggcctacagttttactttgggatttggtaacctcagaaggtttcagaaggaagccagggctgagtaggtgagcctccaggcttccacgtgtctacatttttcataaagaaatttgggattttatgggaatgtaaataacagggctcaatgtggacaggactctattgagagtatgtgtaggattttaggtatgtgtttggaattacagaaaaaaggaaagcaagaccagaccaagtgtgcctaagaagagtttaggttcagtaagagctgggagaagtggaaacatccgcataagatcacaggcctcgatttgagatgggacagaggagacatgctcttggttatctgtctgcttgtgcctccctcaccctgacttccctcctggctgtgactgactagtgggatggcttcttaggacagtggttctggtttgaccttgcaggaatgacatcatctatgttgatgcttcttctccaagtctagatctgggtaggtagactataggatttggaaggaggaaagtcatttcttgtgaagcaagggagcatgaaaggaagcctagtaagtgatcagggacaagtcaactggcaatactacagagatacacttgctctctggttcagctctttctcaagaagaatagccatgtggaccttcagttggtttgcccccaaagagtagagagtatacatgaactggatggtgtagcatctgctacaagtggggaagaaacagaagacctcctggcaggttgactagtctttcttttggatactgatagttggcaatgataatggaagagagcttgctgggtagaaatcttgtatataagaaaagcagagcttctaaaacatgtggtgaagaagtggagagcaggagacttgggggtggggtccatagagatcctgaagaatatggttggggcttggtttcttctcacagaggtcctggctatactcttgtgttttcccaacctcagaatgaatagttatctcttttagccacctctgttttgtgttgaactttcttcctttcctctggaagtagcaagctccacagctattgggtgtggccatttatactaacaatgggggactgagacctccctctctaattcactcttgcccctcttgccctgttttatgccccatggcacgagtctcctgatgtgtgtgttcttcgcagccagcatagctgcaaccagagaagggccttggaccagatgttccaggtgtttattttattgagggatttgagtttcactgtaaacgttcccagggggaacgagcttttgacatctgaaaggtttcctttttcacaacatacagaggtcatgaaaccacatggccatggcagatcaggtgggaacagttgggggctgtagaaccacacgacagttccagctgactactgttatgtgaagtgcagcccaatgtcaccagacttcttgtttatccaagatgagcaggaaaagcagcacccaccgaagtggctttgttgacacagccgagacttcagaagagcctgaaggttacacacagcagagaccagagggcaaggtgtacagtctggctcattcgtgggtatgatgagcaaactttgttcatttatgaagacacaccccaaatccctactgagtaaatttcccggcagctttgggacattttctcctggcaaatggtccaggccctactgctctctcacatcttctatttctgtcttctaaatgcatttacaagtcttcaggccccagctgagcaatcacaaggcgatcacttactccaacactaattgccaagccctggcttggcagctatttctttcttttccttctccctgccccttcttttcttttttcttttaaagggaaatggccaagaagactttctcccctctttgtacagaataaaaagcaggtattcttacccaagttatctcagtcattggactggggcaactgcctctcatccctgaactgtcactgatactaatgtaattcttcctcacaccagaaaatgagcttgtgacgccaaggtcaagttttggcagcaaacgtggccgggcgtcagaactctaggtttccttcaaggtctatgagttactatctcggattgattgcttcagttttccctcttttgctggatgagggaaaaaatggaatattggtgcatacacattcaggaaagatctttctgactggatagcttttaaccctcctgtttagacataggaggctcaagaataaggacttttcaacttaataggaatatatgagtgctaggctataaagtgagcataaaggagagtgtctgttccaggcaaagactccatgatcaatgtatggcttttagcccagcaagtagagtttagaaatagtgcttgctgataagataatgtgttctgctcttgccgttgctggagatccaagaacccaagggaagggataggatggcctcaggggcttccccgacctccctttggatttctgttctacagacacatttcagcttcctcatgtgtatagtatacctgtcttcaatatctactgtctgtttttcttgaacagggacagatcaaccttgatgcatttctctcttttctctgcttagtcccttttgctctagatctatctagaccagtctagatagtactcactgcaaggaagagctcagcagtggacgcgcctctaacttccttatttctgaaagtttagaagtcacatctactaacactatagaatacggagcatgcccctgtcgtcggaggttcacttctacagctgttcttctttttccgttaagaaaggtgttttctctagcatggctcacacacagatttggtcttggggtgggggtgggtgtcctcatcttcagagtaatgtggatgccttctgtgaactgtgttcacacccacaggtcatcacccagtgatggtgtttttctttagccttcagaatacttcctggttctcagggaactttcatagacttcaccccaccaagttctcatagccagtcaggtggctggtgttggaggaagttttacttcacagacctagaggaactcttattggtagatgatagaagcagaaacttgccttggttcttagattctcttcccagaaatatttccattttacctgtgggtgaagagatcaccaccaccaccaccaccaccaccaccaccaccaccaccatcaccaccaccaccaccaccaccaccaccaccaccaccaccatcaccaccaccaccaccaccaccaccaccaccaccaccaccaccactgaatcaatcaaccaagccaaccccacacccatcaaaaccctgagatgcttagcaaattacattaagaagacaagtctccagggaagagcttgcttagctggcaaagtgcttgccgcgtaagctcggggactcgagtttgatcttcagaactcgtgtcaaaaagccagacatggatctgtaatgccgacactggggaggcagagccaggcagatctccaggccagtgagagagcccatctcacaaaaacatcagaaacagctccagacaaatgacatctggaattgtcccccggccttcatatacacacatgtgtgtaaacacctgcatacataaaccatgcacacatagaagcataaacacacacacactcccttatacacacacagatgtacagacagacacatgtgtcagaaaagaagagggacaggctaagtaacactcattaagaatttactatgaatcaaggaatgcctttgcaaataccggctcacttcacgttgaatagtctctacctgagaactgctttgtagttgaatcccattctgtagatgaatacactgaggctcatgagtcacagctgatttctcctaaggccctactgtaagctagtggagtagtcaggctgaggattccaatccctctgactctgaagcctgtgtactttcttaaatccctcgagtgtatcttctctctggttttctcagcaagtaattcttggaggagggatgcggggtctttaaagttttattagagagctgcaatctctccctggagatttagcaccatccagcctcaaagagcttggttgagaaagctgtttagtttctttccctattcaggtcagatcttgtaccaacagttgcattactaactgcatatctttattgtgaaagatttcttagcgctagcctatggtctgctttatttccaggaatatttaatgtcatattccagcaagtcaaaaggctttatttaatcccttggagttggttgtggtgggatctctctcatgtttacttgctggctttttttattttttcctaagaagctgaggacaaccgactgtcctcacactgctgtaagcagacatttgattgctctgttcagctgggaacgttggctccctccgccctgctttgatttgggaatgcttgtggcaaggagactatgttttcaaggagagaaggtcaacagtgcttaggtggatggggatagagaaaatggctggaggccccatcctcctggacactggctggacagtatgcaattcatttctccttagggagcagggatgaaaacacggtgaagctgatttactatgtattacaaaccaccagaggttgaagtagtctgatcctggactccaggcttctgtgctgatattttaatagcaagtgttcacctctctgcctgccccttacctctgcactgagactttgtttcctacatctcagaggggtgggtgattggtatacttgtcccctgactgcccctatgcaagtgaccttcctcctctgttccatgcggagagcacactcaattcactactctctattactgatggtaatagaccaagggctttggaggtcatatctgagatttccacttactgctgttgaccttagggaagctagtgaacttctgagagtttggaaggaagggcaagaggccctcctccttaggactgttctgaactttcagtaagacaaagcgtgcaaagagcttaactgagaacattatgaaaggctcagggcactcgccctccctgctctctggtatccaatttcagagattgtagtgagttaacctggaagagctgctagaactaattcccaaattccgattcttatccctgctctctcccttgcctctcggctctctgttccacacccctatgtgggtggctagatcatatatccagcttaacttagccaaagtgggattcttgcaatgtttggtttggttttgggacaggatctcaccggactgctcaggctaccctcaaacccacagttctccagcctcagctttctaaaagttagaaggacatgcgtagtccatcacagccgcaggattcaagccatggcttctctctctgtctagtttccttgtgctttctctactgtagccttgagccttctcacacttcctggatgtgccaggctcactttccaccttgtgagtttttgtatctactgatccttctgacccatggaattcccctgcctagatctctgtgcctactcctcactcagcaccattttctctaatgtcccttgcttttgaggcttcctctgacaactcaaacttagtggcctttctgctctttataaacccatcatcttttagtgtagtatatggtctggtcatttccttggacttggtttttatactactgaccatttgaaaaataaccatttagtcatttgtgtaatagtttatagcagatgggctctacttgaatgtaaacttctgtgggatggagactttgtattagtcacttctctgttcccagtacttagggcaaggtgagtagctgtcccttggtcacccttcagatgagaagatgtcttgaagatctccgtgtgtaagagcaggcacagggcaaagactattcccaatgtggcattctttctttctcattatcctaccatcttcccttggatcctatctagccagagtcccccagagttctgtgtgtggcagaagccattgcagtctgatttaaaaataaggatatatgtgaatgacggacattctaagaatgtggtggatcagggcagtaattcaatggtaaagaacttgcttaaggtgtatgaagccttgggtttgatgcccagcataaccaatgaaacacagcacactacaccaaatcaacaagaaccaggaggaacaaaaatgaacactgtagagtcacagtcagcaacatccttctgcaggccacatacacaaaacgtcagtgcatctctgagctttctcagctctgcctgttcagaacgtccaccaaatcacctgcatgagttattgcctcttactaagtgttatgatgaatgggatggtgttggtgagcaggtaagagtgtgtttttgagatggattgactgagtttggattctggttctgtcatatatatttgagtatcctaggaatgtgacctcaccatccttcgtatcagtgccttatcttctcatctgtaaaatggggataatatgcttcttagcaagatgagacaagctaaaccttatcaaagtatcgaagtgaatgtctgggtcataataagagtcagtataagttagttgctgtttttcttctttgattgacagtgtggtggtcagtctcttgttacatgacttaataaatgtgcagtaaagcgggatttaaggagccttcatgtccccttaaagtgctacatgcctaagacaatcaacacacaagttgtgttcctgtccctaaaatttaccatctcagggacctggacaaagtcaaaacagtggcacctatttttattttaatccttagagagaatgattaaagctataggttttacctcatataaggggatgagaatattgcttagtgaccatttgcccagtttgtaaatgactctgtgtacaatccctggaattccccaaataatacaagtacctatcctcaatgaaacactctctctatatacatatagtgtacagaaaatctcagagctgttcagactgtttttctacatgagttaaggtctcctttggaaggtgtactggacagagatgcacagtagagccatttaaaaaatacccttcctattagatgtagtggtgcacctctgtcatctcagcacttgggaagtggaggcaggaggaccaagagggaaggcgtttgtcaagcaagaggagtagagttcagattcccatattccacgtgaatcgtgaatgcctagtaggcagattggctagtctttaagtgtagtcttggaaggtggaaggggggatcctagagcaagtgagtgagatttgcatgttggtgagctctgggtgtgattgagagacctggtctcaaaaaataggatggaaaggtgattgaggaatattcctgatagtgactttcatcctccacatgcttgtacttacacatacatgtataccagtgcacacatgtatgcctacatgcatgtgaacacatcacacacacacacacacacacacacacacacacacacacacacacgacaagaaaagaaaagaaaagaaaagaaaaagaaaaaaaaggaaaaatgaagaatctggagctgcaatgtattatacctcaaattccagcccagccaggcaaggatttatagaaaaactgtcttcacccagtcaactaaacagacacaaggaaaaagtataataaattcaatactatctgagacttagaaaaatgacatttctattgtaacataaaaatgtttccatatttattatctccatcataatcagataatttagggctgtactaggtatgggggctttcttgggaataatgaaatttttataaagttgattgcagtaatgcattacatagttctgggaatattctgaaacactttgaattatactttgtgtgtatttgtacgcatccctgtgcatagacacacgcacacacacacacacacacacacacacacacacacacacacacacacaccttgtgctccttcttggtagaagctttgagactttgcatgaggcccactgtgtctcgtctcactttgctatggagcagaaggcagcaatgctctagctgaccactgctccattagcctgaatctttctgggaagatgatgggatcataccacagctgaccttccctggtcatagtaggagagagaaacaaacatttgttgtggtcactagaagatgaagaagagaagccataaatgacagtggctctactctctacttgaggtggatggggcaccaggagcctacaacacttttggacttcttcctccattatgctggaaatagactccaattaaggggagcactcttgtaaggccagctttgagccttctatcacttaaatacatgaacttgcagagaatgaacaggttaaggttctgcaacttttgacaggctgcacagacagctgccattctctggatcttcccacgtgaggtgctggaggaccccggagacctcagagactgttagtcagaaatagtctgagtggaggaggtgactgtggagttggatttggaagggctgagggtttgggtgacaaaactgttgagggcacagttgctgccaccatggatatgtgcagccacatccccttggacttccttctagagctgtttagatacatggttctgcttcaaggctgttgtgtctggccatcagtaaacagcaagagctgccaatagaacatgacttgaaaacacagccatttgcccatgggataggatccccacgggtacactgatttgaggagattgagctgggaaacatatgaaatggtgcatctgagaggtggcctgaagaggagcagagtgtggggagaaggctcaggaggacagctgccggtgtgtaagaggtactgtttggatagagtggttctgggcaactctgcctcacacagtctcttgtttctctctactgtgccatgatcttggataagctgcttaaacctattaggtctgtttccacaactctaaaatgaggtaccatttaatgaccctgtcttgaccttacagcattttgggacatttcttcctggaacaaaggtctgagctgggacacagctggaaccatggggggcgggggaagggcaagaccagaagaaagctgttgtcagtttattttggcattacccactgccttctatccacctatcttgtctctctggaggataagcattccaatccaatgacttcctaggatgtggcttctgggaaccactgctgtgtgctgaacctttgctgatgcacttcatatgctattctctgctcctaatagtaagtgtgtgcaatcaccctccccattttactcacagccagttgaagcacggagagtttaggcaacttgcctaattacacagctaccaaatgtcagaaacagaagccaaccacaagtaacctgcttctggggctctagagcctgttcttataatagccccattccagcctgtttagccctggctgttgtcccttctcaggaaccaggctggagaggaaggaaggtaataactgcctaccctagaatgggccctgttgagggaaggtccatgagagaccactgaaggagcaccagcagccaattcctgctagttacctggtccctaacagtgtgtgggtgaatgggcagtgcctcttagcttgctagttgacattttgagggctgttagcaattatttacactgggtaggttctcagcaaagaaaaggatccttaacgatctattgagtggagactacctgttctgagccacatggttgcaggaacccaagacttccatttctggggctgatttctctcccctttcctttgaccctgtctcaggcaggcccatctccgtgagtgctcacctcactataacatctgcagtaggagacgagaaagagaaatgttgatggcattgctccagcctcctgtgacttcaaaccttacatgtgcaacttgggcagttgactcctccccagtcaagctgtatgagccctggagatgggtgggggtccctttattctttctgcagtccaggccccgtgatacttgatgacttgaagcacatcttttcttcttcctcttacacagattatcttattgaacctcagatgaatttgtgccacagaattcaccaaattgcagattcccaacttgactttctcggcggctacacatttatctgctgcctgcgaagacagtcaattcccagtgcactgacaccattagttgactggccaattgcctctcttggggccttgtgtagaaatgattccttgctccctagcgaggcaggtggcaagtttcctcaattgattttcccttttcacgtccatttgtgtcttttctccagtctcctgtgggcttgggtactcatgtcctccctggtaatttctctatgtttgctgttttcgtggtcagcattctgatccgctcagggcagggctgttgtgacctagataatgcagccatggtctgctcttgctggcccactgcatgcttccaaaaatctttcacacagccctcttagaagaagagtcctaaaatcaccttagatgccattttttcctcattccaggcatctggggtctcaggatcccctgagctaaaccattaagacttttcttataaccttgtcatcttttaatgttgaaatattcagtctactgctgaataaacattctgggctctggtctgcatggctctaagccttgggaggttacacggtgcattcatattttccagttttgattattctcagtagattttcttctctttttttccccctcccctaaggcttcattactttccatttgtccacatctcttttgtccatttctcttgttaaggacagatttagaaaatgagtttagtcccttggctgttttggggtcatcattaatctcagttccactccattccttagcaagcttgcgtcttgtgtctcctcccttgtttcttgttaatgaatttgcaaaaaaccccctttctcccaggttaacccctctgtctctgagggttttccttggctctgcagagcttctgcctttcctgggtgggcttaggtgacccagctgctttaatggccctgagcttgaagggaacccgggtctctcagatggggtaaactgtgcactggccccgggttgacttcatctctggttgtgcatgggatctccctcaactccctcagaaaccaatctaagaagcccagtccagaccctaaaataaacctgtttcttccacagtgccaagcatcattggcaacaaggatggagtctccttaaatcagctttcctcagtgttaagagagggtctgaagaatgggtatgtgactggaacatgtgaaggccagtgaggtcatgagcttcgagttagccatgtcactggtttcctcatgtcttggctgaagaactaagtccaagggtttttcttgaaacactagcaaatagttcccataggagagggattgatactagccacaagacaccctctcctgtggctgcatagagtaggtgctcactcagtgctatttcctggtccccatagctatttcagaagttcagtcagtaagtcagtaaggtctaacaagcacaaggtctaagcacctggctttgaggcttctctaggattctgaccttgtatgtgtgtgtctctctctgtgtgtgtggtgtatgtgtgtgtgtgtgtgtgtgtgtgtgtgtgtgtctgtgcgtctgtgtagtatatgtgtctgtgtagtgtgtgtgggtatctgtctgtgtggtatgtgtgccatgtttgtctgtgtgtatttgtgtgtatgtgcatgtgcttatgtgtgcacttatgtgtgtgtttctgtgggtgtgcatgtgtgaatgtatgtgcacacacacacacatgtgtgtgtgtgtgcgcacagataagcaggtagggaagtagggatgtatagtgggatctgagtggagccaggtgtgtactctgcaggccctctaggaagtttctagcacatacatccttgacagctctcaagaggtgttggtgcagttaatgtcatggagagagtgtatcaatgtgctattgtcacatgagggacttgagacagaagagtgggagatagtgacccagggctgtatgtagaatgtgtggttggttgctaagcattcatcctgcctgctgtagtttctttttttaagtacagatgtttctccttactctggtcgttactctaccttcaagtttacaaccctctttcttttgtcctaaattttatttttattttacttattcactttacatcctactcactactccctcccggttacccctcctagaatcttccccccttctcctctatgtgggtagggcccccctgggtaggtgcatctttttccactgaggttagacaaggcagccagcccatctagaagaacatatatcatagccaagcaacagctttcaggaaatcccctgttccagttgttcaggacccacatgaagacctagctgcacatctgctatatatgtatgtggaggcctaggtccagcccatgtatgttctttacaaccctctttccttagtgtggccctttctatgatttgtcccctactcaggataacactcatcagatttgccatcccatacatcctattctgacgaagctgaagtcctcagaggatctaagattcatgggaccctttaaagacacatgactttctctgtgaatcagtagaggacatctaccttgcttattttggggactttactgaaagttgaggttaatttggggactcacttcttgtttgtctaaaatttcacagtaatagggatccaggagtccttgggaattttacagcaggtctctttggagcttagattccagaatgcaagtcctgaggtataggtatctggacttgtcaatgtctttcttgtccttgttgatagatcccatgttgttgtgggaggaatgaaggagtataaacgtctgtaaagagtgaacagatgccctcttcctcttcacaccttatctatcaaatgggtctagtcctatagctttgactttccacacaccccacttcattgtggagatgaagtgaattaccttgggaaaggactttgcaagtatctgagaaagtattttggggggcatgctgtattccatatttgctttggaggaatgggtaatgttgggccagggagttgcccatgtccctgggccttccattttcagtgtttagaagtagaggttactgctgggtgagatcttctctcctcatcacagaacagaactctagggaaacaactaaaatgtgttgtcctcttgtatttggctaaaaatgttgatcagtgtacattactgtctcagtttgaagatcaagtctaaaagattttgaaaagaatgctgttgatgagtgtgacattaaccttatcccccaagacaagcttgtgctgtctttagactgtgacatttagctgttcatacttttgtgctgtagagtccgacaaagcccatccacgatagtccttggagtcatggggcactttttaaaagaaatatgaatacattaatttcctctaaggatctctattgtggttctatctgccttagacaaagactccagcaccttgtgtttaggacatcgacttcatggagagaatttggggtgggaggggacagtgaagagacagttaagaaataataagatgaggactgagatctcagatcatttagcaaaggcagatgatgtggcttttgggaaggggaaatttatagcagagacaacttcttggagtgctgacaggtatcctaaaacccaccaatatgtgggacttggcatctggagaagagttagtgaatgtaatgggaactgctctcagtagtgggcactggatgctatatgtccagaaccatgatgtgtttatagggccataagcatgttggagctgacaacacaactcacagctattctgttgctgtgaagagacaccaagactatgacgccttttacaaagaaagacatttagttgggctcacttaagtttagtccattgtcatcatggcaggaagcatagaagcatacaatacagacatggtgctggagaagtagctaagagctctacatttggatactgaggcagcaggaagagagagactctgggcttagaatgatgtcttagttagggttctattgctgtgaagagacaatattaccaaagcaattcttgtaaggcacaatatttaattgggactggcttacagttatagagattcaaagcattatcatcatggcaggaagcatggcagcatccaggcagacatggtgctggagaaggagctgagcattttgcatgttgatctgactgtagccaggagagacggtcttctccttcttccccttcctcttcttcctcttcctcctcctcctccttctatttaaacaatttttattagatttttcttcatttacaattcaaatgctatccccaaagtcctctataccctccccccgccctgctccctaacccacccactcacgcttcctggccctggcatttccctgtattgaggcatataatctttgcatgaccaagggcctctccttccaatacatatgcagctagagacacgagctcagggggtactggttagttcatattgctgttcctcctatagggttacaaaccccttcagctccttgggtacttagagacggtcttctaggcagctaggaggaggatcttaaacctcaacccccacagtgacacacttccttcaacaaaggccacacctattccaacaaggccacacctcttaatagtgccactccctgggccaagcatatttaaaccaccacaaatgggttctctggaacctcaaagcctacccctattgacacactttctggagcaaggctacactaatcctttaaaatagtgccactccctcatgaccaaatattcaaatctgtgagtctatgggggatcatttccattggaactaccacaggccccaaggactgttttgcaaaagggttagaatctttgggtttcagttacttttttttttttttttttgcactgagataaaataccgaagagcagcagcctaaatgtgtgtgtgtgtgaagattcatcttggattatggttaaggctctgcagtctgtcatgaggattaaatcacagcaggaagtagcttcagctataataataggagcctgtggcttgacctgtaacactgggatatattaggaagctgtgtgtgtgtgtgtgtgtgtcagagagagagaaagagagagagagagagagagagagagagagagagagagagagagagagagagagagagagaatactagttccagctaaaatcccaaggcctgtccctcagccatgcatgcacttccttcttcagttaggcattgtctctcaacagttccacaacctcccaaaatagcactgccagccagctagggaccaagagatcaagcacaggagcctgtcgggggggggcatttcccattcaaaccataatgcgttgcttctaaggatgacatgactcaggtgggccctgtgatctgacacccactcactggatcagtagaactgttcacttctgagctcaaagacgactcagcgctgtagaagaacagagccggttctcttatggatacatctgttgccagtcacatgcatctggtgcctctgtgccccattccataaggataccttggcaattccttaccagggacccagcctctctcacacatgctcagctgtttaaagtgtcacagtaacataaaggctgtccctagagctatttttcctctatttctaagtgcaacctaaaggttttaatatcaccctcctaagtgtgtctctgatgttttaaagatatgatccacactctctgtgtcagtctacaaggaaattgtctagtccatgcagagtcctgcttgggatagcaccagagacgttcaagaaagccttgtgatcatcctgacatctatgccatgccttttctggtgctctttgtcctggctaccctgggcgttccagtccctcaatgtattatgctacctcttcctaaacaatagtctttacctggcttgtgctccttctttgggattttcactgtccagccctagcttgcttcaccttcaggtttcatttccagagcaattgaaaaggttctgaagccaacatcatctgtgcaaagctgcagagcgatggaaaataagctgcttagcatattctgagcccactgagcctgtctgaagatggtgtcaatgcctctcagtcaggtcaccagcagtgcccaccccacaggggaattggtgtgacctcagtgcttacactttctggagaaaaggggcacataggttgtttttatcctgctcagtctctggtaagtctctctgtacttggagtgggcggctcaactctctgggtggttgtaggactgtctttcatcctcccactctaggtaccaaatatccctccacagctaaggaactccttctgataccaggaagggtaatgtttgctaagagcaactgtgtactccttgtttgttgtgtggaaaagaaaacaaattaagcccttgtaattatacagtcaggcatgttcttaaataaagctcaagcagtcagaactccatttaggatattaataactgcatccctgagccctgagccctgagtcccggcagctttctctccctgcctggctcatctcagccatgactgttccatctctcctttgctgcagacgttttcataaccccagccattttaagcaaccccaaccccagcaaaacctggttttctgatcccacaacatgcagtgcccctagtctgggctttgcaaagattatagatggtgcattttaaggatttcgtgggtatggggctctgttaggatttttctttgtcctgctagcactctcatatttttgtttgatgacatgagtatgggagctgagcagaactgggttttgtttccagccgagtgctatctaactcgaagactttggtcaagttatctaatctccctaagcccctgctaacactgtgtctctcataggcttttatgggaacctgcctgggaggagtaatacccttgaattcctggcatatcgtacatccatttcttttccatacctctgggcgaccccttgtgtcagcattctagggaagtgtcttgtttcctttggtcatgattcatgcttttctttgatggacttcaaccaatccagatgcctgttagatatggtaaagaaactgcagaatgggtgcatctgtttgggagcctcaaagggacacagagcaggcaccatcatgcatgctgagtggttttatttcatgtgctgttctgagggtctccttggcatgcttcctttagtgtccaagggttaattacttaagtaacacactgccttaatcaacaggctgtggtcctttatgaacatgtgtcccaaggaccatctcattctatatgcagtactaagatgaaatagccattgctaccaccattgtcccatcagggaggaatctgagtgagtgagtacagtagctagagttagtgcagtatggatagggacctgggtctctgactctgaatcttacttcttttctggtgcattgggccatttcctcagccacaaccaatacctaggagggcagccacctggtttctagaattgaggctgtttcaaggctttccatgggccagttaccacctttcacttctttctgtttctatcccatgacttggaaagcataggacagatttcactggtggtattgtgacagttgagccattgctggaaagtagcttgaaaacagaagaccaattcaaagttttcatcacacagttatgtgaatagtacatcaataggctctgtgaaaggcagggggacaggtgccttggaaatgactctccgtggcaaacctgcgccttggggtgggagagagaactgaggacactgaagcaagatttggcccaggcagagttggggtgttcaatttagttgtgaagataaaattagctttcttaggctagtgacgtcaacatattaccatctgctggatggtgctgaccgttccaggctgagggattcttgtactctggagattctgggaaggatttcaggcttgttcatgaaagaatatttgtagtagtgtatagaaagagagggagaatgaatggagagtgtgtgtgcacataaccacaagcaatcagggagggaagccaaggggagggggagagactgtgttaagttccaggctaggtattttcctaacaataactgcataattggtactttccctgttttactgaggagtactgggggactctggaactcagcagggttttgtaacttgcccacgatcacacagctagtaaagatgtattgatatttgttaatgcctgctctagatttcatgctatttctgttgtaactggtaaaacaaagtcagttgccctccctaagcataactaggaatccagcgtcttcaaacagggatattttaatccccctacccccccgtcaaaaaacactattcctatgctcaaactcaagaattcagcaccatggccagggctcgcgcccaaaccttccctcacctacggggtaccagtgcaaggcttctgagctgttcacatagagtaggcaggcaccctgctctccatttgccagcctccctgatggaaagcagacctacaggaagcaggggaagagctcttcccatcatttacttagggataggccagagaggggcaaggctgtcatgtaggatccggattgacgtgaacagaggaatagagtagggccattggattctgaaaggtagtgagccaccatgatcctttctctttcaggataaaccctcagggtgaactttctgtgtttcttctgttcagtgggggtatggagaaagtgaacttggcataggttttcctacaggaatgggcaggggaggccaaactgtcagagcagctcagcagagctggtttagttatgctgtctgtagtgataattttccttccttcttggaaggctttcttctacatgcaacaaaacagtcttgatctagagatctagacatcatccaacatgtggatatgtgtgttcccacatgcatgcatgcatgtacacacacacacacacacacacacacacacacacacacacacatacacacacacagagtattttgatatgtacatggtgtgtggattttggacatagtggaatcggattctaacattaccggctttgtgaccttggactagcttacctcatctctaagccatggattctttatctgtcagatgaaaaccaatcattataataacacggaccataaaatgttgtcaggaagagtcaatgaagaaatatctttaaagcacatagtagttagtgcctaacaagcactcaataaacgttgctcattatttcaatttccctgaaaatgatttctgtatcccaattttcttcagtttgctcacgtgattattattactaactatgggaaagtccccatggcagagaaaatgattagcaagataattaattgttttcacttcagtacaaagggcaaggttttaaatgaagttgcggtcagccatagtagactgggaagaagaatcccaatttgttcccttggccagtgaagatccgaccatgcctcagtgcataatttaatttgtttcagcagtgatcatgattggcatacagacatccttctcctctgtgccaagaactttgtgttagaattttaatccatatgtgtttatggtcactccatgatgaccgtggcttttacctgggcccatgaatccatgtgttttattctctttccttccttgtgtctaagttcagttcaaagtgcctcctctccagagtggagtgtggtgccacttaagggcagaggcagaagacttttaagttcaaggtcagattagggattctttgtgaagactcaccccctacccccatcctcccaaaccaaaaagccaaaacaacccaaacaaccaaaaacattggatctggaggtacagctcagttgattcagagcttgcttagccttgggttcaatgtctaatatcacagaaatctggcatggtggtgcatgaggtgtataaaatgacatcgggtaggaggaccaggggtcccatattattgttgaccacatgatagtttaaagccagtctgggatactgtgagatcccatctaaaaagacaaaaaccaaaaagtcctcccaaactcagttcctatttctttctcggtgtgaagtgaagaaagaactccctggtaacgtaaccaagtgtgtagtggtgggtcctgtgttccaaatcttcaacaggagatgaaagtattatcttgtttctcccttgcaagtctccctggaactgccatgtgtgttggggcgtggacttgcttttcccaaacatttttgcagaattgggcaacagaggccaaaagcctgtgcttggtataaattacagaaaacagtgctgtaatgacattgtttggtgaataaattaaaccctgagtcatgagggcactaacagagagagtagagaagtataattaaagaagaaaaggagaggctatcagctgatgcctggagtgagacagagccgagacaggactgcatgggagggtagcaggtctcttcccacagctgcagctcagaagaggggccatggctgctacttacagtcagagaggctaaggaaacaagccagtgcttctgacactcaggagattgtatgggaggtgtgtgtgtgtgtgtgtggggggtgttagtgaacactaaaccatgtgggctttagaaggtctcaaactccctagcagctggggataagcttgggcccaaggtctctattggtagatgggactctgaggaatggggacgaggtcaggggtggagctgggattctgtgtagttattgtgttctaggactcgtttttttcccaccatctcttgtatttcctgtgggcttatcttgtgaatgctttctgactttctcattctaacagtctaaagacaagcatctcagggcaacgattcctgtatatttgagtgttgcaaccaggctatgacactatactgtcaacaaggagtggagactatggagaaagtataaattcttgtctggtttggacaagacctcttctgtggattgttctagaaacacagctagtgaaatgattgctgcagcaaaccatcatagctccttcacccaggacacccagtgactggcatttcccatcctggaatggccacccagggagaatgtgttggatggtggagtaagtggagaaagcctttatatacagtgaaattttgctgacactagcactcactgctctagaaaagtcactttcctttcttgtttacagatctgagtcagcacttaggtgtgtgacacacagtaggcactcaataaacagattgatcttagaacctgatgtccaagataggacatttagtggactagcccagtgggattccagaacaagagagcatgtttgggcaaaccaggacatgcggtcttctgtcgttggtatttacttggatgtattacttttgtgtttctgggctgtgtagagaagaacaatcaaggccttaatctttctttctttttctgttttgagtctgggtctttcagtgaagtccagactggcctggaacttacgttgtaaccaaactgtccaggaggttgtgaataccctgcctccagctcctgagtacagggcttataggcatgcattactgggtctggggtcatctcttttctgttttttttcttcatcactttcatgtgtgtttgagtccattccacagatatttactgaagattttatgtcccaggtatattgataggcatccatgacccatgtacatcaagagaagctctggatttagacttttagggtcccctttatcgaacaggaatctagatgccatcttgagatggcagtgtgacaaatgccaacttaaaggaatggataaagtactctgggagcttaggtggggaaatgagtcatctagaggtggtggccatggaagacttcccaccagaagggtgcttctgagagttacagaaggcaatcaagaactcagaaggcgttctgggagaaggtagagtgttgagccacaatccactcaacaccacgtttccaacaccactattccgaagggtagaatgatgataagataggtggatgcttgacccacagagcacactgactgattgctatctgatgtgaatcatgccatccatcagcgctgttgtgggagatgataatgtgagtccagaggaggcggtcctgctgcaagcatacagctttgcatttcaggggccaatcttggccagggcacaagaggagaaagaaaagatttccagacaccaagaaccaagaagaggtttgccgtgaccctaatagtggtccctacgccattcagtgatacagtgtctagcatcttggacaacttttttgcctaggctaaccgaagggccacagagctggccaaaacagcaagaccatgtgcagttgtagcaaggccacaggtctccagggtatttctggaagtgagagatggataatgaaagggaacaggaaaccctaggaggaagttggggctttgcttagatacagcccatctgcctcaccatccatggctttgaatgcagtatgaaaatgttcctcattattttccttggatgagtttgctatcctgatgatattaattattcttaaaggtcaacagcgctctttcgaatccccttctgttctatcatgtaatcagttaattaattggaaaccatttagccgcatctgctgagcgagtttgtgtagtgcaatggttgctcccgtgacgaaggttctctccatgtgcctccatttgaaaactagagtgcaccgccccccttcttcctgccctctctgctggctgattcccattcattcacagttgccttcagaggtgctatctcatcagatttcctctttgtgcatccttacaggtaatgggctcttaccactgagtgcctgtcagatgacaaggactatgtggggtgcctgtatgtgctgttttatttgatgctcgcccactaatgtggtagagctactcctccattcagttcaggggagaggagagaggcttagcttggtgaatggagctgtccaagaatcatagagctagaaattgtgtgagcaggaatggaggagagagagagagagagagagagagagagagagagagagaaagagagagagagagagagagagagaaccttacatccttgtttgctacagtgctggtgtttccttgtgatcctaggggaggtgaattggactgttagtacagttctcatttactctctcagtcctgggctctgcatttgacaagtgacagcccaggccttttttattgggcttttatttatttttttcctgatatctccaaaacctgatgcttgccacagagctgaaaccatgtacctgtgcttatcgataagaacagcatggtgctatcccgcaggtggtgacaggtgagcgtcatgtaaggaccagaaacaagaatcttagtagcaccctgcctcctcctgctgctgctagcaggaagcaagaccaccaactctgaagccagggagctggggtgttctgtccccctttacagctgcttacctggggtcagttatgtgcattcttcctgtccatccccactccttcttggatgtctgtcttaggacaccttggaccttcctgatgtcccctctcatgctctctagtttacaactcctgcttttatcctctaggttcacaatctgtggagttcacaatggtatctttcctgggggagtgccccctgccccagctttcataaaggttcccagatggaaaacccagagcttgattttggggggaagaaaacctctgtgaaaagtccctaccccacctcaagcgtgtgtgtgcgcgtgcgcacacacgcacacatgttcatgcatgtgtgtttcctgtgtgtgtctcctctgtttgcctgtctgcacatgcaagcagggaggaggcagattcttttcatcttgttagttttcaatgcaatgctaacccttccccctactgcctaatgtcaccatccaccaggacggtatcccccacaccgactttcagatgagttatgccagatctcttttccagttattgatgatggcatttgctcccagcagcctgtgcacaaagttgttggatcctagcaggtgtctctttacatccagacagatatcctagtagacatattcttcagcagttcagagtttgacccaccaaacttttgagggtatggacttgattggagtcccagtcaactcaatctggggggaaaaatcaccagatcaatggttctctaagtgtggttctaaaacagggacatcaacattccaggaacctcttagaaatgcaaatttcctcctgtcctacctaatcagaaactccctgaggtggcaagagccttaaaaaaacaaaacaaaacaaaacaaaacaaaacaaaaaaaccaacaaaacaaaacaaaacaaaacaaaacaaaaacccaaaaaactagcctctgggtgcttctgttactaggtgtgagaaagcttctagggactcctctaaacccacactccttaaggccctattctccccaggttctcatcttaaaggacttgcatgcagagatgattaaatcagagcctggaaaaagctccaagcagccttgtactcacattctcaatgtttctaagacagtcatagattgtcctttaaactcaaaggtggatgatagaaagaagactggtgactggcctccttaaaaggaatagtttctccatctaagggcagcttgctccagccaggttgtcaccccccacccccccatacagtccttcccagggctcaggtttccaggcatgtcacagttttctcttgtgaagttcctggactgccgtgggggtgggcagggaccttggctcccttcctcctgactgagtcccctcccctcctttagctgtgtaaggggttcttgattcttccttcagaggctctgtagactgtatctttgttctagtcacgacagcttttgaggaaaaaaagaaaaaaaaacccaaggaggtacgtcatcaatcacatggtgcccctttagggccatggccttgactgcccagcttgcacaccacgtgggtggcctggcccagagcctgaatccagtgcctgccctgcaggcctccctgggattccagggagcccaggagctttgggtcaattagcttttggttaatttgctaagaaactcggaaggaacaggaacggagtcccccagaatagcctccggaacactcagggtctagtgcgaagtagacagtgtgaggaaacaaacttgaaaggaatgtccttttactagtttgcacaagcagaggaggtcaggtgaggggcattgggcctcagcccacaagctgaggaggggactggggtagaaatgaggaggcaagctatttgctgcctcattaaagtgctttccatattattttatgaacctatgtgttttattacattaagtgatgcgtgaatgcagaggatcgtggcccaagctgtggtatttattttattgggcttggacctggtgagtagagatggctgttctaattaaggagtagggtatgccatgaaggagaagacataggatagtccttgtgacagctgctttccatgccccattcctcatacccaagtcacttttcagaactcatgtggggagcctactattacctgccccctctccccatttagaggagaacaaattgaggtaccaagagattgcatagattatactagcatcctggggatggggattgcagagcaagggctggcataaaagactcccatgaggtcaaagaccatggcctacctatccctttcatcactcactgcatcagaagtgaacccagccaagagagaaggactgatgtgaggatcaggaggtggggcacttcctggccctctccttagttacccttgctggattattttgggaattttttctaaccactagggccttcattttcctctcttgtgtccaggcttcagcaccagcatgcccaggcacagggaaagaaggaaggaccacctattgtcttctgagtgtgcccttccaccctgagagtgggagactgtgttgacacaggaaagcattcttaccccaagggaatagtgaagagctctcagcacctggatcctggctgctgggctgtttccttgatattcttgccaggctgtagtcaagaggggcgatttagaactgaaggctgtgagaggaacgggatcccagccagatcggggctgtcctttagtctcttgctgggaaagaccctcttgtggatgccagaggcagcaaagagtcaagaagaagaacaccttcatctttctcagaagttgattcatctatttttggtgggaccaaactgagatggagggtgagggagagagagtgtgcaaatccgagtgaatgcaagcctgcaggtgagtgtaagtatgtgtgtgtgtttatggtgtatggttatgtgtatgcagcgtgcttatgtgctgtgtgcatgatgcatgtgagcttgcagttcccacttcccagtgggaagaagcagaagccacacttgctgcagctgggatcctctttgttccttggccttctccctgctgggtcctctttgttcttctaccctggctgctgagaaggaagaacttccctccctccagagcctttggaaattcatctcttcaaaggactattggaagacttcagttgaatttgccgtgtgtctgttgaacttgggttctggtactataaagggtataagaggaaggaaaaaaatggttctttgcttccaatgaaaacagtacattaggtgtggccataggatatttaaagctgacagtctgagatatgggcagtggaaaatgcccatccaacattgagtgggggcggggggttggggtggggaagaagaggttgagaagatgtcagcatggcaaacacaggctgtcttgttgaaagaccactgaggctggcctgtaggatgaggacatgaagggtgcaggaagcatagggtgcagtggtgtgctagagagggaccaggatgctgtcagaagcagttagcatggagacaccattgggttcatggtgagttttcagggctatgtatgacatagagataaaggctgaaaagccaggagaagcaacaggaggttgaactcttctcagaaatacttggattataaggtagattttatacttaaccaagtgggccaagaattctggaagagtctaccattttgtccccagctggtctcctatgtatgcagccagagtcttactcagaatgtgcgaagtcctgatcccaatcttccagcctttagggatgctagaaactgctcagtgaggtggtcttggacaacgggtgtactttcttttctattgaacatgctcttgacagctggatttgtgggcagtgttgtcctgacttgactttgtgagctagtaattacactttcccagatgttgacagcttctctttccaccaaggcctccagtcaacaactgggtttcccagatggtggatcgctctgccttggacatctgtggctactaagcacttgaagagtggccagtcctaattgagatgtgctttgaatgtcaaatgcacatttcaaagacttactacaaaaaacaataccaacataagaatgaaaaatatctcagtggtgtttgatactgattgcaggttgagttactgatattttcaggatattgatggatattgatacttctttccaccattttaaaccacgttaatagaaaatttcagctggcatatggatcttgcatttaatttctgttgaagggtactagtctagattaatgtgatagtatatacctttaatctcagtacttgtgagcataacacaggaagactgagaatacaaggccagcctggtgtatataccaagacacttgtccaccaactaaccaaccaaccaaccaaccaaaagctagagagtagagagataggtcagttggtaaagtacttgccttgtaagtacaaggacctgatttctaccccagaacccaaatgatacctaacaggtaatgcatagttgtaatcccggtgctggggagcccaaggcaagaggacacctgggaatttttggagaggcagcctaccctatttgcctagttacaggctagagctaccaagtctgaaatgaaaggtaaacagcttatgaggaagacttgaggttatttccacaagcatgcatacgcatgtgcaagcacacctacatgcacactcacgaaaggcaagcaggcaggaaggtaatgaaaggaaaagatagaaaaggagaaaatgccagcccagggtagaagttgttagtcttttcctatgaaggaccacagagcattttcgacttacagaattgttgcatctatttgactccactgtgaatgtactagtgtaaatgtaaccttgtatcagctatctgttgctgctataacaaattaaaacagttggtgatataaggcaatgtaaatacaatatcttatacttccacattgtgaagcctacagtgagtctctgaggtctagagttcatgtgtcagtagggccttgctacttcctggaaactttgggagaatctcttttttgatgtttgcagtttctaatggccacacacattcacagcccctcctttatcttcaaagccaacatctcatccttcttcgactagcttctttggctacatttctctctgaccttctctcttcttttggcttacacttaaatgcatatttttattaattcttttgatagtttgatgcattgtatcttggtcacagtgaccactttccccaaatccttccagatacagctctctttccatacccaaccactggtgcccactgtttcttttgtaaactcactcagttcaattagtgcaaagtatacatgcttggatgtgtggccatccactgaatcgtgttcctttgcacccgtaaacaaactagtgcttctctcttagcagtcattagtcccctagggctggggcttagtgactgcttcaggtctcagttctggaattttgtgtggcttgagcctgcacaagtcttgtgtctgttttgaagggcttctgtggttactgttggacaacaatgtaacataaggaaatttccctggtgtccctggttcacacccttcactacctccatgaggtcccctttgtttggaaatgaacagtgcgtgtgacacattctgaacatggttatctttggaaggctattattctgcttagaatatggccataggcaacacaaagacagcaggaatgactgttttccaataaaactgcaaaaaactagactgccagcctactggctggggctttctgagtcttagtctagaaatgcattcactaagtatgtgatgagagtatctttttttttttttttggttgatatgctacagtgaagggaagggtctgtggtacaataagtttgagagactcagtaagctagggacttctctcatttaaggccttgagaaattctgccataaacaagtctcttcatattttctgcagtagaaggatttgtcagatattatgctttcccacccggcataatactgatgagcatactagacacttagattcttaggaacccacccttggaatccctgacctagcccagcagagggcaattgagagaaagctgcctccagtctcctgatgtaaggtcaagactccaggcacgtcacttgagatttgattagagaaagcattttggcttcattaaagttcattaaatgagccatccagtgtaatttagctgaataaaaatggctcagatggctttaaaccccacccccttttacaacaatttaattgaggcaaaagcaaatatatcagtgatgcagaaaaatatttctcggccttcaagaagactcttgggcgtcagtatccattttcttgttatggaatctggattttaagaggatgggttgtggggtttcctcagtgctatcattaggtcctggtgatgagaccctccccctaatgctccctgtcactctcagtgcatagaagtcacagagtcaagaccatgaggggtgaacttctggctcttgagcaagtggtcagtagaatgtcagcccaatcttactcccataatgctgtggtctgaatgttggtgctccacagattcatttgtatagttcctcacctctaaggtgatggtcaggaggggcaccttcacgatgagattaggtcctaaaggcagagccttcagtagtggatatcaaccaaacatagaatatcaagttacagtaagactaagcacctccgctcatattaaggctggaagaggcaagctggtatgagggaaagggtcacaaaaccaggtgaaagagtccgagacagcctctgctctctctgttaggagttccacaagaagacaaagctatacaactataacacacatgttctcttttatgtgggtggggggggcttgaaaaagggtgcagcgacacatctgaggaggtgttagattttaaggaggggagagacacatctttcaaaaactgcctctgtgcaagaaataactaagctttgccgtgtgatgcttccacatggcaagcctcaggagtcactaggagctgtgggattgggagggggtttctggatagcagagctgagtgcacagaaaactcgtgatgcgcggaggggatgtccttcagcagctgctgaatgaatcctccaggaacatccagcagcagtggaatttgtcttgggaatgagagttgaaaatctttttggtcttctgtttttctatcacactaatctcttgcaggaggaggctggggtatacctaggggcttaacaaatggaccagtagaagattggatattagcaattggaacttgtctgggaggctggttcatgtgtgatcatgtgtatacagcgtgagggatgacagcataccatgggcttagagtccttcccaggctctagggggctgttcaaattggttgtcatgcccttgggtcaaatgaaagggctgaagacgtgtgtattaattttctgggcctactatgacaccacaccatagttcaagtggcttcagcactttacagatctggaggctcagagtccaagttgctaggtttgatttctttcaaggcctctctgtttagtttttggtggctatattctccccatgtctctccatgctctttcttctgagcatttcaatgcctgtaaagacatgagccaagttgaattaggaccaaccctaatgaccacctatagtctttgtcacttgctctatagaccttagctctaatagtgttaatactcttaggactccaacatggaaatctgtagggaaagcaccatttcataccatgaccatagaaatccaaacctatattatagtggctgagatgatgcagaggtggggcaagtgtcttggagttggaaaggaagacagctgacagaggggtctgtgatgttgacgtgagtgggtatgggtggctggttgtccaggttagtggtacatggatggagcagaatggtttaaggagcatgaagaagtcctgttctttcctcagccatccctgacacaaccgaatagtaagacatactgcccatggagttgacttctgctagaagagctgctgcttctaaaaatttgtcccactcttagtccaggaagtccatcatctctgtcttcagaatctccattgatggcttccactgtccccctttcaaggctcagtgcccaagttaagggccatgggagagctactctggttggattctactgacagtagtgtccatctgctaaccctttataggctaacaggactcctaggctagagggtgactatcagtcatagggctctgctcctgttaaataaagatgtaatctccctttaggatggtccaggggctgcttcatcagagaacctgtctaccagacagagtggcagattgcctcagaggatccctgttttctgcatggttagtgtaagaaaggccgtctcagccctttctctccacagggtccagagtgtggccatatgtgttctgtctttgtgtccaaagctcccatcatccctatttattgcctctggaccacagagtctggctgaagaagccagatacacagaacaaaattaatggctttatatgggagtctcagatgagagagagggacacacacacacacacacacacacacgcacacgcacacacacaggcagacagagacacacagagagacagagacagtgagaggacaaagaggatatccaggaaagtgtttgatgcttcatttcataaatacccactcaccaaattaatttgatgatcagatggttgagatgctggccgttgacccaagcaaaagtcagaggcagatgacaatggatctgctagggaggaggcactaggaggaggctgccatagggctcggaggcagagtgactcttaattaaactcttgtctgatgaacagcatatccagagcatcaataactgctgacagatggatccaggtgaggtgtcagcaagaaggaaaactggggcagtgagttttgtccatctggatgctaatgcccggcaacgctccagacctccattttctcatctatcctgtgtcatgagaatgcataaatgttcaagagggtaggatggccagaggatggcacaccctgcttgtgtttgtgaagtatatggttgtctctggacctaggtattactattgtgagtctgggtgcccaggttagacactgcatatttttctgggactcgtgtggcagtgtatttgtatgtggaaatgtgtgtgagggtgtatgtgtgtgtgtgtggatagtgtatgagtaaagtagtggccactctataatgtgcttgagaaatctgaagaatctttctcatccagatggggctggatgggtggaggaggagtgggctggagatgaagccacacccctgtggcagaatagaagctcattcctctttaccaggtgtcccaggcccccagctgtcttttccatgtaatgaggagggggataatgctatttcttattctttatttgcccagagtgcctatgattttctttctttcagaatccaattttctcttgacatttctgcctgttgtagcaaagcgtgacctttgtaagaggacatggctggcagcctactttctgcctggggctccccggaactcctggcaggctccctgcctgttcctttctcagaaaggagctagtgtacctgggccaggcctgcctctagggtggcttgttcctatcagaagcctctttggccagtggcctgctttatgagtatcctgtgcctttaggctcagtgagcacagggtccctgcaggctgccagtccatagcttctgcagcataggctgtgttcagtggagctctggagaaaactggggatgtaaaggtgcaggctgggaatctttgcaaatttctgccagaattcccttgtgttgagtttctctctctctctctctctctctctctctnnnnnnnnnnnnnnnnnnnnnnnnnnnnnnnnnnnnnnnnnnnnnnnnnnnnnnnnnnnnnnnnnnnnnnnnnnnnnnnnnnnnnnnnnnnnnnnnnnnnnnnnnnnnnnnnnnnnnnnnnnnnnnnnnnnnnnnnnnnnnnnnnnnnnnnnnnnnnnnnnnnnnnnnnnnnnnnnnnnnnnnnnnnnnnnnnnnnnnnnnnnnnnnnnnnnnnnnnnnnnnnnnnnnnnnnnnnnnnnnnnnnnnnnnnnnnnnnnnnnnnnnnnnnnnnnnnnnnnnnnnnnnnnnnnnnnnnnnnnnnnnnnnnnnnnnnnnnnnnnnnnnnnnnnnnnnnnnnnnnnnnnnnnnnnnnnnnnnnnnnnnnnnnnnnnnnnnnnnnnnnnnnnnnnnnnnnnnnnnnnnnnnnnnnnnnnnnnnnnnnnnnnnnnnnnnnnnnnnnnnnnnnnnnnnnnnnnnnnnnnnnnnnnnnnnnnnnnnnnnnnnnnnnnnnnnnnnnnnnnnnnnnnnnnnnnnnnnnnnnnnnnnnnnnnnnnnnnnnnnnnnnnnnnnnnnnnnnnnnnnnnnnnnnnnnnnnnnnnnnnnnnnnnnnnnnnnnnnnnnnnnnnnnnnnnnnnnnnnnnnnnnnnnnnnnnnnnnnnnnnnnnnnnnnnnnnnnnnnnnnnnnnnnnnnnnnnnnnnnnnnnnnnnnnnnnnnnnnnnnnnnnnnnnnnnnnnnnnnnnnnnnnnnnnnnnnnnnnnnnnnnnnnnnnnnnnnnnnnnnnnnnnnnnnnnnnnnnnnnnnnnnnnnnnnnnnnnnnnnnnnnnnnnnnnnnnnnnnnnnnnnnnnnnnnnnnnnnnnnnnnnnnnnnnnnnnnnnnnnnnnnnnnnnnnnnnnnnnnnnnnnnnnnnnnnnnnnnnnnnnnnnnnnnnnnnnnnnnnnnnnnnnnnnnnnnnnnnnnnnnnnnnnnnnnnnnnnnnnnnnnnnnnnnnnnnnnnnnnnnnnnnnnnnnnnnnnnnnnnnnnnnnnnnnnnnnnnnnnnnnnnnnnnnnnnnnnnnnnnnnnnnnnnnnnnnnnnnnnnnnnnnnnnnnnnnnnnnnnnnnnnnnnnnnnnnnnnnnnnnnnnnnnnnnnnnnnnnnnnnnnnnnnnnnnnnnnnnnnnnnnnnnnnnnnnnnnnnnnnnnnnnnnnnnnnnnnnnnnnnnnnnnnnnnnnnnnnnnnnnnnnnnnnnnnnnnnnnnnnnnnnnnnnnnnnnnnnnnnnnnnnnnnnnnnnnnnnnnnnnnnnnnnnnnnnnnnnnnnnnnnnnnnnnnnnnnnnnnnnnnnnnnnnnnnnnnnnnnnnnnnnnnnnnnnnnnnnnnnnnnnnnnnnnnnnnnnnnnnnnnnnnnnnnnnnnnnnnnnnnnnnnnnnnnnnnnnnnnnnnnnnnnnnnnnnnnnnnnnnnnnnnnnnnnnnnnnnnnnnnnnnnnnnnnnnnnnnnnnnnnnnnnnnnnnnnnnnnnnnnnnnnnnnnnnnnnnnnnnnnnnnnnnnnnnnnnnnnnnnnnnnnnnnnnnnnnnnnnnnnnnnnnnnnnnnnnnnnnnnnnnnnnnnnnnnnnnnnnnnnnnnnnnnnnnnnnnnnnnnnnnnnnnnnnnnnnnnnnnnnnnnnnnnnnnnnnnnnnnnnnnnnnnnnnnnnnnnnnnnnnnnnnnnnnnnnnnnnnnnnnnnnnnnnnnnnnnnnnnnnnnnnnnnnnnnnnnnnnnnnnnnnnnnnnnnnnnnnnnnnnnnnnnnnnnnnnnnnnnnnnnnnnnnnnnnnnnnnnnnnnnnnnnnnnnnnnnnnnnnnnnnnnnnnnnnnnnnnnnnnnnnnnnnnnnnnnnnnnnnnnnnnnnnnnnnnnnnnnnnnnnnnnnnnnnnnnnnnnnnnnnnnnnnnnnnnnnnnnnnnnnnnnnnnnnnnnnnnnnnnnnnnnnnnnnnnnnnnnnnnnnnnnnnnnnnnnnnnnnnnnnnnnnnnnnnnnnnnnnnnnnnnnnnnnnnnnnnnnnnnnnnnnnnnnnnnnnnnnnnnnnnnnnnnnnnnnnnnnnnnnnnnnnnnnnnnnnnnnnnnnnnnnnnnnnnnnnnnnnnnnnnnnnnnnnnnnnnnnnnnnnnnnnnnnnnnnnnnnnnnnnnnnnnnnnnnnnnnnnnnnnnnnnnnnnnnnnnnnnnnnnnnnnnnnnnnnnnnnnnnnnnnnnnnnnnnnnnnnnnnnnnnnnnnnnnnnnnnnnnnnnnnnnnnnnnnnnnnnnnnnnnnnnnnnnnnnnnnnnnnnnnnnnnnnnnnnnnnnnnnnnnnnnnnnnnnnnnnnnnnnnnnnnnnnnnnnnnnnnnnnnnnnnnnnnnnnnnnnnnnnnnnnnnnnnnnnnnnnnnnnnnnnnnnnnnnnnnnnnnnnnnnnnnnnnnnnnnnnnnnnnnnnnnnnnnnnnnnnnnnnnnnnnnnnnnnnnnnnnnnnnnnnnnnnnnnnnnnnnnnnnnnnnnnnnnnnnnnnnnnnnnnnnnnnnnnnnnnnnnnnnnnnnnnnnnnnnnnnnnnnnnnnnnnnnnnnnnnnnnnnnnnnnnnnnnnnnnnnnnnnnnnnnnnnnnnnnnnnnnnnnnnnnnnnnnnnnnnnnnnnnnnnnnnnnnnnnnnnnnnnnnnnnnnnnnnnnnnnnnnnnnnnnnnnnnnnnnnnnnnnnnnnnnnnnnnnnnnnnnnnnnnnnnnnnnnnnnnnnnnnnnnnnnnnnnnnnnnnnnnnnnnnnnnnnnnnnnnnnnnnnnnnnnnnnnnnnnnnnnnnnnnnnnnnnnnnnnnnnnnnnnnnnnnnnnnnnnnnnnnnnnnnnnnnnnnnnnnnnnnnnnnnnnnnnnnnnnnnnnnnnnnnnnnnnnnnnnnnnnnnnnnnnnnnnnnnnnnnnnnnnnnnnnnnnnnnnnnnnnnnnnnnnnnnnnnnnnnnnnnnnnnnnnnnnnnnnnnnnnnnnnnnnnnnnnnnnnnnnnnnnnnnnnnnnnnnnnnnnnnnnnnnnnnnnnnnnnnnnnnnnnnnnnnnnnnnnnnnnnnnnnnnnnnnnnnnnnnnnnnnnnnnnnnnnnnnnnnnnnnnnnnnnnnnnnnnnnnnnnnnnnnnnnnnnnnnnnnnnnnnnnnnnnnnnnnnnnnnnnnnnnnnnnnnnnnnnnnnnnnnnnnnnnnnnnnnnnnnnnnnnnnnnnnnnnnnnnnnnnnnnnnnnnnnnnnnnnnnnnnnnnnnnnnnnnnnnnnnnnnnnnnnnnnnnnnnnnnnnnnnnnnnnnnnnnnctcccctcccctcccctcccctcctctcctcttcttttctcttctcccctcccatttcccttaccttcctttttgcctccccttcccatttccctttcccttccccccttttcccttttcttgcttagaaggtagttgatgtcccccaattagcctgccatcttcatgtcttagtcccccattaaaaaaagaggtatttagttaataacacatcacccctaagagccacccaacacttcctattgctctttggagtaataccagtctcttgccaagatctgtagatgtggcatgaatccctggcttgcttatctacagtgagtctctgaaatgttattcctggctttcagcccattctcattatttcttttgccaggtcccatgttaccttgtcagaaggctcttctccgagcacccgagtgaagctgtccccctcccaattgctcatgtcactttgtttatactcttccttctgcttactaatttgcaatttgaagataaggttctgtgtttcttgtcagtggactacctctaaggcctcagcctagcctatagttgactttctatagcaagtcatttaaacataagtgcacatgaaagcatgtgtgtgtgtctgtgtgtgcatgtgcgcacacccacatgggtgtgtgtaaacaggagtctgtatttgctttgttacctatgtgtttagtagatacaaatatacacacgttcatgtggagatggatattcatctagatggaatcagcaccgcatctgttcccatcagcagacgaatacattgttcctgggttgccacttcatttcttggggtgtctaactactgcctttaagggctgtcgtcacatcaaacgttgtttgttgagcccagcaaagtaataactgtagacgtgtttcttcttttattcagaagactaatggctgctcccttcccctgtacatcctaatgagaacaattaaatagccattaggagaagagatgtgtgaacaaaaggttgatgtcttgatctcttgaatggccatgtgttctgggggagggatggctaagaagaattgataagaaacctgaagatgtcctgcctgtgtggatgtaaaagatattgtgagcttagctatccacagaactattgcctagagaaggttgcttcaagcaggctccctgagcatttatgaaaaggtattctggaggggtaaccaagagaaccacgttgtttcttgaatgtgtaaaatcctatcctttataaaggctttagcatcctcttcgcatctgcccccctggtctcaactgttagcagaaacaccattagcaatgtatatgatggtacataatgatagctctatcattagatacatcgggtagacattagagtgaagaaaaagaagcagagcagagcctgcctccagatgccaagttctacacccagggcattcctgatgctggatctgtcctttaactgccccttttctttgtcaattttgcagaaacttgtcaagtaaccggctcaccacactctcctggcagctcttccagacgctgagccttcgggaattgtaagttcggaattgaagactttgtccaggtggtggagtgctggtaatggatgggtgggaagtatcaagagtatcaagaattggagccacctggtggctgggttgtttgggttggagagcattgagcatatcatgttcagggacagtgacccaccccatctctggatttcacttcagatgctgttgctaggcacattttgtttcgaaaagactgagtcttatcttctatcagcatttagttttgttatctgcaggaaattagcagtagcagttttaatattgataataataagtatctcaattaatttgtaataaacaacatttgctatacataattttgtagctttaccaggtatgcttttgcttacatgagcttagatttaccacaacaagagccatggaaggtaggtatccttttctgcattttgtgaactctgagccctagaaacttatttgataatcaactacagttttatttataaggacttgcataactgatactagaatatgggcttccagcttccaactgaatggcctttacagggctcatgatttcctgtcaacttatttagctcgccatctcggcgttgtgagcatgggagagggcatttatttgttttatctgtgtgtggactacttagctctgttgcattccaaggctgatcaatgcattcctaccctagccagccattttgtgcaaacagatgttggctggatgagtaaaaattcgtgaccagtgctgggggaaaataactcatgttgctgtgtgagtcatcaggtcatctctgtgcatgaaggacagtgtattatgttgagggaataaatcaaggaatatattgaagtggaattgaggcatggatggggttagggagactgagttttagagacactgttcgtgtgttcctttttacttagtgactcagatccaaattccctgactgtgagcacagtgcctactaagaagcaatgaccttggaccatgaccttggatctctgccttggctacaggcctttcaccttcttctctttctacctgtccagttataaccttggttttctcagaccagctgatagaaacgagaccatttacaccctagtaacacattccccctgacaactttgcatattatccttgtccccatggcttgattgcttacatgacactttccacagccatcccagggacagatagagagaagttatcactttgaaggtgttgctaactgggatttgtggtcatctcagtacttagaaagtaaaaacagaaagatcatcagttttcgtttagcctgagctacataagttacaggctagtcagtttaggctgcacaatgaaatctagccttaaaaaaaaggcaatattagtgtatattgctttcctttcttagaagtgtgtgtcacacacacacaatacacacacacacacacacacacacacacacacacacacacacacaccccagccagggtactactctgatattctggtatgagtaccagtaggctcaatgatcagagttcttagtcccatttgattgagatgtagggataccaaaaataggcagctaaaggaaggtagacaaaatattgctgataaaacattctcccaaacataatatgtcacagacctctgatgtcagtactgttgaacttagtgtgttctattcattccctccttgagctagatgtagtgtagtggaggatcttaggggtaagttggtatggctacagcaattcttaccatcactgtttccaaactactcctttgtgccaggcactgtgacaaggaacctattatatatccttcttaatagattttaatctttaggacaattctgtaaggtaggaattcttgctcacataccacattggaggaccctgagttacttagtaagggaagatttttgtttcatgtcacccattagacaaatggtagtaggcagactgaaagtctggacccatgcttaactgtcccccactgcttttcagccaattttatactcttcagcaagtgtgtggccatgcctctctgctaggtttccctctgtatcagttacatatttcattgttgtggcatggataagataactttcctcatttagaccagtgggtaaacggggactggatgagacacaaggtaagagaggatgggtttgttttagtttaaaacaaagataatattgcctatcatggtgaataaggcatggcagcaggagcatggggcagcttctgcagtcagggatcagagagagacgaatgttgatgccctccttactgtctcctttttattcagcctgaaaccctaatccatgtaatggtgttgaaaacatttaggacatgtctcagcccctccattaacccagtctacaagctccttcacagatagacccagaggtatgtctcttaggtgattctgcatccagccaaattaccaatgatgaagcaggtaataggtacttttctacttctgaactaaaacaccatgagcaatgcaacttataaaatgaagggtttatttggggcttatagttccagtagggtaggagtccatcaccaaagtggaatggagcatgacggcagacaggcaggcaggcaggcaggcaggcaggcaggcaggcaggcaggcatggcactagagtaacagctgagagtttacatcctcacccacaggcaggaagccaagagagcacactgtgggtagttgtgagcttttgaaaccttaatcgcaccccaagacacacctctccctacagagccacacctcccaacttcttcccaaacagtcaccaactggggaccaagtttttaaatgcctgagactgataggggcacctcattcaaaccactgcaaagcataatgacctcaagctgattgggggcagaaggtctgtctttcttgatcaagttcttctaggatccctgccccttcacataggcgaggacagagacagcactcctcaagaagatgtcagggtctgctaaaggctgaattattgagaaaatgttcagtgttctttctaagaaatcgttggatgtgaaatcaattgtgtgctgccccggtgacctgcttcatggggatttagaaacagttgttctgtggatatatatttaaagaaaatgtcacatttctcccagaggatcatgggattctgcattcatctttccccgggatcaatataccggtgagctagctgtaacttatggaggaatgaagacattcctggcggtgtgagtcactgtatgagtgccaccatatccaaacagtattttatttctgtcatagtgttaaatcagaaaaaaattgcagtggtggatgaagaagcccccctctaaggaacgatcaccctggtaggggtctattttttgaggaagaattgaaagctgagagtggaaaatttatctttgggctgaaggggactgcacattggctcttagctgtggctatgattaaaatccaaacaattgcatttcctggcaaatggaagagggggtaggattttcttgtctgacttcttgattagtccacatggcgccatctgccatgagccatctagaccgccaaggtctgcttgatggagtctgtgggatggagtttggggatgtgtccggtgttttcagaaagagtgttggccttgtaggagagggactcagtgtgctggggtagccaggagagtcatgaggcagctgtgtaaaactttcagtgagcatctgcagaaacacacagggtaaatgggttatttaaatatttcttagcatgtttccttccgtgaaggtacctttgagggcctttgccatgccctaaccaacttctctcctacaacacaattcttgatgtaacagttgatgatgtagttgacagagttgaaactcttcatgagaagggttgagtatgcattttcattgggaaaggagaagaaaggcaccgagtaatgaataaatacaagatcctggctcatccttgaagctgccccatatgggagttattttaatctgttttgcaaatgagggattcaaggcttagacaagtcaagtcattataccaggatcatatggctggtgagttggtaatctggagactaatattatgaatttcagggtggttactgcctgaagccactgtttctgaaactcattctctttcaccccctcacacagtgtcacactatgaatgtccagcttgtcctcccaggagccaagatgacccgcacccctgatggcaaaccctagatcatcaaatcatttcaggattcttgctgtgtgccaagacccttcttgtactctcgcttttgtgagattggagggagggcctttggcaagcgtctgactaaatcttcctccagctcaggaagtacccttcttgcagagcaagctgagaatatcctctgaactttgctatggtgcagccagcagtatttcagtggtagatctgatggaatctgacttggcattgtactgtgctcaggagtttctggctactattttttcccctgaaactgcaactatctgtccttagatcagagcaagactctgcaagattgttttaaagataaaggatgaatacagaagaaaagatgtttgggttctaaatcccatggtacaacttaggcaatggcaagaggcaccagaagttcatcagccctcaacatagaaaccctccagaaatactctgaggaccattaatgcatcttgagcaggcttctcttaataccccacagacatggagcagacatgattaaaatagattggaatatttcattttcttaaagcaaagtgataattatgtgtgttgtaatttgcagatttaatcgacttggtaaaacactcactcagtgttgaaggaggctgggctgaccctggcactgtccttctcctagtcctgaatgtgatcactgatagccctcagtcaaggcgtatccatccaaggaattccatcactaactctattgctattgtggtagttttcgctttattgtgactcccctttaactcacaaagtacacatattagtgctacagagaaactgtgttggaatacacttatccccacttacagattttaaagttgagtcttggtgagttttctggcagtcctatttctgatacctgccttattaagtcactgcaaacctggtgacttcaaggtgatggaaacatttttgttcgtcgttcttaggccatatgtctgagttacagtgtcaccagagcacctctcccttcaaaggctctgaggtttaagccctctctgacattgccagatactggttgctcttggtgctttcgggtttgtggcaccatccctggtgctaccttccttgtggctgacatccattcttcctccagaccctctacagataccagttcttgcatgttggtttaggacccactgtaaatcaaaataatctcaatcctttatctctaacttgatcctgtcaacaaagaagatcctacttgtggatcctggggttaggacatggaccaatatctctggaaggcacagttcaacacattattcaggttaactaagtaagctcaacttgcatcttttatttatgcacttttaacacagtcgattatcttaaggaggcctaggctgcacactttgtggggtgggcagaggccttgcccctgctcctctgggtctcctccctcttttgtacaatctggacccagaattgtacctggcagtgctgatggtctgaaggggagaagaaaatcaccctcatgatgaccggagggcaatcaatgttttctgaacagagtcatggccttggctgatcctgaaaacttgttcttttgtgcctgtgcctgagtgaggctgagttaatctgtgggaactccctagggccctgtgattaggccttgggccatcttgaggccagggctgggcaccagtaaactgtgcctgaagcagttgctgctgtattattcatggggcctcttgcattattgatggagcacagagcagggctctaaactgagcaagtttgccccagaagctctgattgagactcctctgctgagctcggactgcgtggagaagggaaccacaatgtccagcttagagctaggactcgtgtgtctctcttttttcaacctctccttgtctggatataaaggtcattgtgcatcggatccatgggatgtacaggttgccccagtttggaacttaaactgcattttgctaggatgtcttcctaagaggagtagccaccccacataacctccatgcccactgttcccaagaagttcctagcagactctggtgaacagcaaggcaccgaatcttcaggtacatcccttctcctggaccagactgtagaagcaaagcccaggagagaaaggatggaaagaaatgagctgttactgagccagtgcctggcacatcccagccagctcagctgactcttttgccagccccaggatacattggcatggtctgccttttgggccactgagatgctgggttgtgtcctcacatggaatccaacaagaggttggactgtattaagctctatgtggcttgaggcaacactgcttaatctcctcacttgtctagtctgatcagtgcaggtaaataatttgtgtttgtacatctatttaataatgaacggctgcatcttgtcaggcgagcagctggggaaatccaggctgacttggctcagtttgcaaatcttggagttacagggctttcaatgccattcaaaggggttaacaggcctctccccaggtctctgcatgggaagcccaaatcatgcgcatgtgcatgtaagtgcacactgtgacctctggagcctagaggtcagtctgttagtgctcaggtgtcagtcacctgttttgtgggacagggtcttttatttgtctgggacacactaaccactcatcaaagcccagagcttctgcttctgccatcccactgctaggtttgcgagtgttcacgcgatctttttccatggatcctgctctcttgctttccttttttgacttattattatttataattcactcattcattcattcatttatttattcattcattcattcattcactttacattccaatatcagctcccctcctcccagtacctcctctaacacagaccctccactaaccccgctcctcttctctgagaaggggtcccatgggtctctctctctctctctctctgtctctctcacacacacacacacacacacacagaggcacacacacagaggcacacacacagaggcacacacacacacacacacacacacaccctgaccagcccgctctgactttcactcctgctgtattctgtctctttctgtctactcatgctttctcctctgctttcaatccaacgtttcttctcctggttatttcccaccctttggagaccaaaagcccatctttcatagcacacttccttcctcttcactccttctttccctctgctttccactctttccttcgatcccagcagtacatcaaagcatgtcttgctgtttatgctgtctgcagaactgttgtgtctctccccagtttttgtctctgtactctaatgccttaaatggtgggcaatggaagcctggggtagagctcccatgatcctctcaggtgaaggaaggagatgaggtgatgtttactttcataatgatccctgaggtgccatttggcatttccacccttatcttcttctcaggggacagtggagcctttcagagacggtatggcaatgaccaatagagtctgtggtaatgccttgtggtcctgtgcattttcctcagtttcaatttatgtatttatatatttaaggaatgtatttttaaattaaaatataactacatcaattccttcttcctctttcattctcccaactcctcccatgatccctcctcaccccttatggtctcttattctgtcattattactgctacatatgcttatatgtgtacaaatatgtagatataactttctgagtccatttttgttgtgtgtatatgatctcaggtccaaccagtctatgttgtgtaaacaactgtggaggatggagctcattccgaggaggcgctaattctccttcgctcaacagccactaattgcccacagttctttgtcttgggattggatctggtgaacttttctcccttttgcttaagcatatatattgatattgtcactgttcaggtctttttaagacagccctttatgggagacacaatctcagaacaaacttcttggtcctctggttcttacaatggttctgccccctcttcctcagtgggtcttaggtgtaaatgtcatgttgtagagttggtctctccacaatcggttgtttttttacattgtgtcttgttgtggttttctgtaatggtctccatttgctgtaaagagaagcttctttggtgaggaatgagagctacatttatctgtgggtataaggataagatttagactatagttaggaattaggctggtctagtaacactagaaggttctcttctaagttttaataacctgtctggtccccagggagttggctagctttcttgtgccaggcatggtttcctgttgggcgggccttaagtccaattagacaggtgctggttatcattaacacatgagtgtggctattgcacctttagagatattttagggatatctcgccatgctgatcattgtgattgataggcatcacagctatataggattactgactgatttcttcctccggtaacttgcatagcactttttgatattatggaagacagattgcagttaggaagcttttagttcagatcggtggttctcaccctttctactgctgcagtcctttaatacagttcctcatgtggtgaccccccaaccataaagctattttgttgccacttaataactgtaattttgtaatgtaaatatatgatatacaagatatctggtatgtgaccctcaaaggagtcatgtcctctcaaaggggtctcagcccacaggttaactgctggattagatctagctccagtcttccaagtcctgtgccctaagtgtgtgatgtcttcttcagtagggtctgaccttcgacctctgagagacaaccaaagttaacagcaaatagtgtatattgtttagggacccacaactcaaacggggtttctcatgcctggtactgggggttttgttagatcatctgtaacctttgtgggagccttgacagcacaagtgacacaacttcgcttcatacataagtattattgctttggggttatttgtctctctttctctttctccttttgtactgacttcacttccccttcacagcctcttctccatttccaccacaccccttttcaggtttttgtattcttttattccccttaagttctccccttccatcctacagtataaatgtccttttatacttcctggtttcttcacttactgcatattgtatacccactcctgcagattcagagctaggcagcttatgtctttctgggtctaagtcactcattcaatatgatcttttaaagactcatcagtttacttgcaaatttcaaaattccatttttttatagctaactaatattccactgtgtttatgtaccacatttacattatccattcatttgttgaaagacaatttccatttcttatctattgtatctattttgtttgtttgtttgtttggttggttttcaagacagggtttctttgtatagccctggttgtcctggaactcactctgtagaccagactggccttgaactcagaaatccgcctacctctgcctcccaaatgctgggattaaaggcatgcagcactactgcctggcattaaaagaacatctttgaacatggctgagcaaatatctgtagagatggatattgagtcctttgggcatatgccaaggatggtatagcagggtcacatcataactcatttttagctttttgataatttgctatactgatttccagagtgctattatctgcttttgttcccatcaccagtgaatgagggctcccctttcctacacccccactagcaacaatagattagggccctctttccttacacccccactagcaacaatagattagggccccctttccctatatccccactagcaacagtggatgaggctcctctttccctaatccccactagcatttgttgtcaactgttttgttgctcttagccattctgactttctgaatgtgggagacaaaaaaaaaatcacacggtcacgtcagtagatatagaaacaccctttaacgaaatccagtatgctttcatgacgaaaatcctagagagagtagaacttacctcaacaaaacaaaggccacgtatgacaaatccatggttagcattatcttaagaagaacttaaatcaatcccatttgaatcaagaacacgatggttgcccactactcccactctcttccaatataatgcttaaagcactagctggagaaataaggcaagaagaagaaattaaagggatacatataggtgaagatgtcaaattatcccaatttgcagatgatattatatttgatattaaagttccctaaaattctaccaagaaactttcagaagcaacataaacaattacagcaaagtggcaatatacaaaatcaacttataaaaaaatcagtagcctttccatacactgacaataaacatgctgagagataatagacacattggaatttacaatatccttagatagtaaaataaataccttgaatgtaacccaaccgaggagatgaaagaactcttcagtgaaaacttctgatgtatgaagagatgagaggcatgtaggaaatgtgagacagcctgtgttcatggtccagtaaaatcattattgtgaaaatgactatcttacaaaaaagcaatttacagtttctatgcaattccaattcaaatacccacagcattattcacaggaatagaaaaaaaaacttaaatttatgtggaatcagaatagaccctggataaccaaagcaattctattcaaaaaaaaaaaaaaaaaaaaacaacaacaacaacaacaaaaagatactgagggatgagggatggctattgcaaattagaaggtatattatagagctatagcagtacaaacaatgtggtaccagaactgaaacagacatatagaccaatagaaaaaaaagatgacccaaatatgaacacttgtaatgtggtgtccatctgatatttgacaaagaggcacacacattgaagaaaaggcagcatcttcaacaaacggtgccgggaaaacttcccttccacatgcagaagaatgaatttatactcatatatattaccctgcagaaatatcatctccaagttgatcacatctcattttgaaacctgcaatgttaattctgctataaaaaaaaacaacaacccataagtagtaccctatgagatatttatgtaggaagagattttttgtaggactccattagcctaggaattaaggccaacaacttgacaataggatctcataaaaccaaaaaaatttgatatgggcaaggaatgaatcaatgaactgaagaagaaacccagagattgggagatagcatttgccaatttcaatgtgaacaggagttatgagaaccgaagttcaggaccacaggcccaggccctaccagcccgtctagctgatgcacatatgtgagttagagaagatggccctcatcagcagagatggtggttccattctagagcattgggtttgagattcagcattgcattggctggattctttgagaaatgcacaaactgcccaactgtacatggtaaccccgtgcttataaaacatcccaactgtggcccaagctttttgtcttagctcccagtggtttccttactgctctgtggacaaattccaaatattccactgtgctggtaaactcctccaccacttcttcccccatcaggcactccttgacttgagcccgtgccctggctaaactttgctttccttgatggcttccttctacctcttctcttagtcttcccaacaagagctctggaagtcagggaaagagtatgggtggctcactgggctctacagcattcaccccaggacagcagtgggaagtctaaagacagagggtcatgtgagaagctcaagcatgaagcaggcgtcttaactccttgtatttattatttttctcactgctgtgatcaaataattaacagaagcaaatgaaagaggagtttatatgtgctcatggtggttggagggtacagtccatcatggtggtcagtttttttatgatggttggagcggaagacagctggtcacattgcatccacagttggaagccgagacaagtggtgatcctcagcctgctttctctctgtaactcagttcaggatctctcgctccatgaaatggtttcatccatattcagggcaggtcttccccatttcatttaggcccttgacacacagaggtgtgtctccatggtgtttataagtccagtgatcaagctgacggtgatgattaaccattacacccttcagactttgattggacttccttgtttgtgcagggacaacagtggctacctgttgggattgctgggagaagcagagacccaggaaaagttgggtcccttcctatcccttttctctgagaaagcctgaagaagcaggagaagtcttggatgttctcagactcaggatgagaagctgtgtggctgtttgtacattccacctgtgctgtcctagtcatcaggaacatggttcctctctctgaaccccactcctttcctgcaagctgacaaatgctgatgcttgcctatctattttagaactcgccagttgtcaaaaatacccagtgcttaaaaaatacgcagtgacccaagtgcctttcctccaggtgccaacagatcgatcccctcaatagaccagagagagaatcatgttcccttaatggccctggcattcagattcagtctgtgctctttaagggttcgggggattgattagcaccgttcatcactcccctaataccccagtagaggaaagatgtgacttattctaaattacaaggagaatctgtggagaacaagagctttgaacttgactcgttccctatcagccattcctcttcactggggtgactgctcccagaggacaaggactgccctattcatttctattgatagcattcaaccacagccagatacctaacaggtgctcattaaggagccattgaattcatgaaggaataaagctggtcccacacgggcttggaatatatctcagaaataactaactacctattcccccagtgaacatgtgtttggggatcggtcttaggtgctgtggatgcagcgagttacaaaacaggttacatctctggcctcaatagagctttttttttttttttaaaatctgagaaggcaaagaaacaaaccaatatgaatatttaaggtgttatgaaatagtaataaattctagataggagaatgcagctagcgaagggatgaaagttatcaggacaggattgtagtggctttggtgaagatgatggccagagagtgctctacagcttcttaaggaagtcaggggaacccatctgacagataagttgggaaagagtttggcaggcaagcaagacaccaagggcaaaaatatccaaggcaggttcaaaccagtcacacgagtgaactaatacgcatcaaggtctgtggctggatagggacaggggctcagggaggaagtgacctcacaggatgatggagaagcatcggctgagtatggctttactgatgacaaggcagcagatgacattgtggaaggtggtgggggaacccaaggtccgtggggccttaaattccaatgcatctgaaagccataggaaggttttaaggagatgaacatctcagcttgacacatgcaaaagactctcactgcccagtgacttaagtgaggtaaaaattttttttcagtgaaattattccttttgaaactaaataagttcatgaagttaatgctgttttttttaattattttattcttctgtgatattacttaacctcctctgtcttatagcattactaatatttatattttacttgcaagcacgtgtgtgtgtgtgtgtgtgtgtgtgtgtgtgtgtgtgtgtgtgtgatgcgtgagtatgtgtatgtatgcgtgtggacacaagtgtatgtgaacatgtgtgcacgcacctgtgtggagtactgaagtccctgttgcatgtttcccatggctgaatctggagctcatcacttgcaggtattctgactagccagcttgttctgggaatcctgtgtctctgcctcctgagtgctgggattatgggtggggccattcccacttggcatttacagcattcaataggtctggggagccaaacttccaacctcaggcttgagtggcaagcacgttatcagctgagctacctccccagtctccttcccttattatttttaaatttttttcctggtgtgtgttcattctacacagtgaagggttcccttaagataatctatctcaagtgtgacatgtttttgatcatattcactcccagatgctcttctctctctgctttcctaggctgctttcctgctcccatctcttccttcacctttcctctggtttcatgactgtctctatatctttccctgtcttgctgccttggaccctgtctctttctgtctctctgtctctgtctgttcctctctctctctctctctctctctctctctctctctctctctctctctctctctctctcatgcttttatgcatctatatgaagtctaggatgcccgaatgagaggaagcaggatgactctttatctgggtctggcttatttcatggaggagcagcaggggctcattggcctcagtcctgggagggagttgggccatccaccgttcagggattccttcccctctcttcttgcccacaggagactggagcagaacttcttcaactgcagctgtgacatccgctggatgcagctgtggcaggaacagggggaggcgcggctggacagccagagcctttactgcatcagtgctgatggctcccaactccccctcttccgcatgaacatcagtcagtgtggtgagtgagcatcagcactgcctggtctggccagcatcccacacaccccagagaaggggttgtgcctcaggctggcctgccagggcctctttgccagctatctccagtcttgacctctgcagtgggtgtaaatgagatcaaactttccctttcctgatcatttctgtcttgagccagcctcgggaatggtagtcctagaaagaaaagcagaaaagaattcatgtgcccttcttagctgatctttttatctctgagtcacctgtcaatcaaacttgaagaagcacgttttaatgtgcaacctctagacttactatattgggagcttctgaggtgttttctagaacattgcttctatgcccaaccagagactagagaatgtaatccctagttccagtgggaaccagacacacaccaatatgtaagacagttgaagctacaggtgtggttgctagaatgccattccatggaggggtgcaccacttagaccctgctttgtaggagcatcccattgtatgtacttcagttcttggttctgcagtctctggagtgagagctgtcaatcagctgggggtggggttatagttagtacttttcacattgatctgacacgagcgattaaaagacaggagaatttcttttggcccacattttgagagtacggcccactatgatgaggaaggcatagctgcaggagggcagtttgaggcagttggctactctgtaccccaagtcaggaccagagagaaggatgagcgtcgctgctcagctcagctccttctttctgtttagtcagaccctagcccatagaatggtgtctgcccactttggttgatctattctcttaggcacgcttagaagagtttctaggtgatttttgagcttgtcaaattcatactaaccatcacaagagtcttgcacaagctcagggaagttgtgtcagctgtgccagcgttgtctctgggcaaggcaagaagcaccactgtctgcctggaggcagagctcctctgtggactgtcacctgacatttcatctccttatcccactctgtcctcctagatctcccagagatcagtgtgagccacgtcaacctgactgtccgagaaggagacaatgccgtgatcacttgcaatggctctggctctcctttgcctgatgtggactggatagtcactgggctgcagtccatcaacacccaccaggtaggtatcctataaccaggcccatcaagagttaaggaatgaatatcccttaattataaggaagagggagagattgtgatcatgttcctctgggaagaaatgtatagacccagattctgtggagatgtaaatttctggtcattttgatctttgttgtggtgctcaaccttctgtgcattggtttcctgttttttaaaaaaatcacccagttttaccatttaccatccaatattaaattgaggtttacctgaattccaaagaatctggagcacggtctgcgtgttttcagtagctagacttcattcagcttttacttcttttttggaagtgttaggggttagaaaaggaaggcatccttgtgtaaatagttggttattgtcttctgattggggttttcagaccaatctgaactggaccaatgtacatgccatcaacttgaccctggtgaacgtgacgagcgaggacaatggcttcaccctgacgtgcattgcagagaacgtggtgggcatgagcaatgccagtgttgctctcactgtctactgtaagtgcatgccatcatggaggacagagaggtaccagaccgaggctgggatggggcagatctatcactagggctgatctagagccctgaccctggtctttcaagaagggcagaaaggctgtcacaaggcaaacctgaaaaatacagccaagaaaatttccttccctcagtggaaggtttacctctctagttcagttctgtattcaaaaatctcataggttggcccattttaccctttgttatcaggaaaggtctccatcttaggaggggagctccaactaagatagatccaggatgcttagataaagacacatgtttttcccttttattgtctggtggtgggaactctgctgcactcagactttccagagcagggtgagaagtgggatccccatcctacttcctagaaggttcttcaatacatgggagaatctgtgtcctcgagatcagcttgcttttccccacagaccctccacgtgtggtgagcctggtggagcctgaggtacgcctggaacattgcattgagtttgtggtgcgtggcaacccgacacccacgctccactggctgtacaatggacagccattgagggagtccaagatcattcacatggactactaccaggagggggaggtctcagagggctgcctgctcttcaacaagcccacccactacaacaatggcaactacaccctcattgctaagaatgccctgggcacggccaaccagaccatcaacggccacttcctgaaggagccctttccaggtgaggcttgtgcacatctcttctggaagctgggggacgggggagagagtttgaaagaatcaacggcactgattcctagttacctgaataacggagctcacactggggcagggagagccactatctgcatcttgtgctaactaggatagccccgttttccatggctaccacagcaaactccaggatgtcccagaaaaaactgttatgcctataaagatgttctctattatagtagagaaatctgggaatttagagatgaacagtatggtagagaattctgacccagtgtttttcttacctgagaatgctatgtggggcttgagagtatacttttatgatgcctcagttttctcaactgtgaaatggacacaagtacaagtgcactgctccactaagagtttcatggcttttgaatgagttatgatgcaggcttggtatgtgacgatggctcagtagctctccattgctgtgaacttcagagttggtcacagtcaacctcatatttaatggattgctgtcctaaacctcagctgcgaggcttgccttggacctgacctccagggctgggctcttttctgtttttgttccatggtaacttaatgaagaagtagatggtgctaccagattctgatggtacaagtgtcacactgactggagccaatagttgtaggaatggaagaactctgaacttggggatgtgattctgcctctttcattctgtccaaataccttcctgaagttggagaaggagaaaagtccaaacgggcttaaagagagaggttgctgtgacgtttcatgatggactatgcagccgataagtttctgcccttgcggctgtgtttctttggtgacttctgtgatttgtgctgaggacagactaggaggcttcctgatcttcaatccacagaagtcagaggttctaaagggatagaggaagtgtatggactgctatcacacagttccaaaatagggaggcatcaaaagctggcatcatgctacatctgtttggaggaacgtgaggtcacagctacaaataaccacagagtgttggctctggaaagcttatttatctcagtgtaagggaagcagtgctggggccccacaagtgacattggggaagtgaggctgcaggttgtcctaaatgcttgtcactgatgtccaaggaatgacagagccacatcagaaaaggtctagaatgtgctggtaattgagaccctagcagtttctagaccctgaccttccccccccacttgccccaacatcacccaagtgtgctcaccaaaaaacctcaaggcattttccatcatcatgggatctcttttggctagaagatgagtcctgacctgcactgtgacatcagtggcttttaaatatggagataataattgtagagcgaattagagtgtctgtttccaatgggaagctctggggacatggagagagccctgggatattaaagagggaggtgagccattctgagctccttcctctagagaacattctagaagctccagggcagcaggggcaatgggcgatgtgaaggatacagccctggttttaccctctctccttccaggagagaaaagtatctcagtatcctccagccttgtagacacaggctctgtacatacacatattcaccatagttggtcattgatggtttggttttcaaggtttctagacaagcagagtcagtatcacccgggaatgagttaaatgccttaaaattcaaattctcaagtttccttagttctcttgaatcagaggctctgtggtgagttctgaagagatggattttttcagttccctgggtgactttgacaattcccactttgcaatcagctaccattaggaattggtggcaactcagccccagggggagggaacaagtggcatatgaaatccctgagagctggaaaagaaagcagctcattggaggctccttcattagatctgtccatattttgggatggacctctatgtgtagaaatttgtttgttttatgaacctttgtgttaaagagatagatggatgattaaaaggctgtgacaggaaaggtgggccagccgtgacacgtgccaagatatctcaatgttcagaagagtaaattatctggaggagcaggcagggataacctacagcactctaagctcaaccttgggctggctacaaaggcagtctatagatcctgttcttctctgttgccctgagaatgttaaaatatcatatttatcatgggtgtctctcattcccaagcagccaagggctatggttaggagccagacctctgaggctgggcagatgtaggtcaaatcccatctgtgattcttaggacaggtagctcaggatgttagggtggtgctgagaatgtgggcagtgccctgtgaaagacggtaactgctccgcacctctgttcctttacctgcgaatgggcatggtcacagtcaccccctaggttgcattgcagagtcattgaagttctgcccaccacgtgctcagcagtgagctcgaacaaagaagagtcctaattgttgttggctcatgttatggcttcttgggtgcagagataaggagaattcaggagttccagaccgctagtcatcctcaggtcaggtgggaaagcctagcagatagtcccagggcagatagtcccagggcagattagggtagtgactgtggttcaacaccagagttcaggtgtacacttaattccctgccagttacatgaccttagacacactacttaacttgcttctccttcaaaaagttgtgataggggtggcagagaaatggctcagtgttaaaggctcttgctactcttccagaggacctgagtccagttcccagtccttacattatacaccccgaaaccctgtgggtgggatccaatgacctttaatggcctctgtgccaccaacgtacacacaaatgaacctaataaaagtaaatcttgttttaaaaaaagttgtgatgaggagctagagaaattactccacaggtaaaagccctttccctgcaacaggagctctcagcctccctagcgctgtgacctttaatacacttcctcacgttgtggtgactcataactataaaattatttcattgctgcttcataactgtaatttcgcatctgttacaaaccataatgtaaatttctgttttctgatggttttaagcgacccccatgaaagaggtgtttgatgcccccaaaggggtcatgacccacaagttaagaaccactgctcttcaagcatcaggacatatatttgaatccctaggagctattttgaaaaagccaggcatggttgtgcatgcctgtaaccccagcgctgaatcagacattctaggttgaggacaagacagactgattctaagagcttctgaaacagtcagaatagctgaaattgtgagcttcctgttcagtaagctatctggtttacacatgtgaacacatgactgtgcacataaacaactctcatatatatatatacactctctgtctctgtctctgtctctgtctctgtctctgtctctgtctctgtctctgtctctctctctctctctctctctctcacacactcacacaaatacacacacacacacacacacacacagagagagagagagagagagagaaagagagagagaggatgaatagacagacagacaggcacatacacacatgtgtgcacacacactcacacaattgtgaatattagtccagagaaacgatgttgcttgaagtgttactgtctgttaaggaagcatatacatccatttttctgcacagccctgtacctgctgatcctgtccttgtctcagcctgtgataggagtcagagaatagataattcccagtatcctttttattccagcataaatgtgtgaattctggctatcattagagagcagccaacagtttttcctggtccaaagattacatgtttcttgcttgtatataaaggctgtctggctccagcgaatgccttgctgatttatgctctgaagtcatagaatgatttttgagattataggattcaaacatgtggccaaaaatatttggttgcaggaaaaatattctccaataaacgggagcctgcagagaaatagaaaagaaatggatactgttgactaagctggttcttgtctcttttcatgcttcgaagcttaggctaaagcccccatctccttcattatcccctagaccagatcttccccaaagttattcagaacaggcaacaatagcagtagcgacaacaaaccaaccagacaacagttactgctatgcatattttctgatagactccacagaaggtcccctagtttctgccaatagtcatagtaggtagccacctagtctgtgttttgtagcccaatggctacagtttctaagaggcttagcctcgctggtaagtgagtgaatgagtgaagcagctgacagtcagccagtgaatgatttgtccttatagttcagggcctggcaggctcatgaccaggggttggcattgtggtgcaatagctcccagagggattagcagcatcgttatcacctgagaacttagagagacaaattctccaggctgggggaatggctcagtggtggacttgttcagaatgcaccagtgaggagctggaggtgtggctccatggtagagggtttgtttagaattcgtcagagccttgaggtgtagttaggtggtagaggacttgcttaacatgtgtgagaccctggatcctactttcagcaatccatagactctattaaaatgtaggcagatctcatgaatcagaccttctaggttgaggacgactcatcctgatttgatttgatttcactttgaaataaattgggccttaaaaagggtaaaagttacaaaatactgggaagaactttcttctacccttcacttggcctattccatgtgtcagtgtctcactcagccacaatatggtgctcaaaaccaggaccagacatcagtttaacagggttatctaacttatagactgctgacatgtgatcagtggtcatagcagtgtcctgtgttttataggattccacccaggattagacagacatcaaatttagttgctgtattgtagtctcagttcctttgaacctgggataggtcgttaggttgcttgtttttgtttcatttttggtgagagcatcatggaaatatttctccacccctttggttcatccttttaaagaacgtaggatgttgccatggcttatcagtgatgacatcaactttatcacttgttcagattctgtttgtaaggttcttccctgcaaagtgacttctttcacccttagctaatcagaataataaggcctttaaaagatgcaaatagcttgattctttttcatatagtgaatttcacattttttggtgattcttgcctgcacaattatctatatactatttcccaaattacagtggtttctgcttcagtcctcccctttgttagttggaattccactgtaagaagaactcccactcatttgttccaatagatgcttgtttatatgaaggaaggactagtcggtgttcttataattcatgtatttgctttctagatttgtcatagtaaattagtattgactgggtggtttagatagcagaaatccattttatctcaattctggaagttgggaatccgagaccaacagttgtcaggcttggtttaccccaaggcttctttccttggcctgtagattctcttagtctgcgtctttgcttgactttctcttcccctgagcacatctatgtcctaatgccttcttatcagaacctaatggatgcattttcacaaatgcaccttttctccaaacaaatagagtgactttctgaagtactgaggttacagctcagttatatgaatcttgaggcagcactatgcagcccataaaaagctgtggctcttcttagtgtgtgtttggattatctgacatctcactgagcatcaacgcctgcctcctcttcccaagaccatgcatctttaagtgctttcttgctaccctgaacacatgagcacagttcttctttttccctgtgccatatctgagacagtccatttctttaggaaactctccttcttttcagtggagggtgacaccagtcatcttctggtgattcgttctattatgtgctcaagtttgagcagtgatagtagagtggttaagagcccagttttaggtttgaatcaactcttgatttctttttcgaggaacagtatccaattacttagtctctagaactctgctttatatcctttaggaagttataaggcttgaatgacatagctcttgaagcactgagcacagcccttggcttctaatcaatgtccaactgaagattagctttcactattgggagagccatttcaacaagccaaagttcagataacacatgtccacatggatgataaaactttggggagagagtctcccagattctcaatgatctgtcagcattgcctacacacattgggggaagaaacttcgttttaggtcatagctgggcctgctctgaagggccatctctggtgtactggtacatgaaggagagatgctgtggtctgggatgtgaaaaggtcctcaattctctgcctcacagtgaaactaacttagttgttagttcctaagtgggctccttctttgagaccaggagctatatctacaaatgtcagagtctccattttgtaggagtgcctgcatgaagaggtagtgcagtcattttagagggagacttgggaaggatttcttgctacgaggatggggactcatggtaagtggcagagatcacagctagtacaatgctgtcctgtacaatccattatatttttgttattacatttgttaattgctgtcttgttctctctctctctctctctctctctctctctctctctctctttttacagagagcacagatttctttgactttggtaagttggctccattttggctttgaaactctttgtcctgatagttttgtgtctgttaaatgcagactgtctagtccatgttccaagtcccttggcagttgagtacctcttagttcattgtgaagaggaagaagacctcggccctcttgtcttgggcagttgccctctaccacagtttcttctctaggactaccaacccctcattctgtactgggattaaatacaactgaaatatatccctaccttgactctctcggagagttttctgaggtatggccgtattgtgaaccccatccaggtagagaagtaatgtactaagacaccccaaaggctgcaacaggtgaataatggattttgaggcccaactcatctcagttgttcttatagagaaaatggggaggctgtaaacttgccaatatttctcttctgacttaagagatcaagcatttggccagggcctaccttaggtagaactgtggtttctcatgggctcacgttacttgaatggcttcactgaagctcagtttataacagagttgagggtagggctggacaatcctagaaggaactggcatttagggcttttttttttttaaattactcttccatgatggggtcagcagcaataactgccatttctgtcaattttaggccagggacagtagaacaaccctatgtaggaacactctggtcacttggcaatgtgtaaatgccatctcggattttttaacttgttcttggtcattaaaaaatcctataatctctcagatgtccctttagagaattcataacttaggccatttattgcaaggacgtgactgtagatagagatgattgatgcttggtgctatttcctggcccattgactggtatttaattccaattgccattgtgttctgaaaccagtcttagggtaatgtctagagggctattcattaagatggtaagcctggaattcactagtgagagggaaatggaaggagggcccggaacggagaaggaaagacgtaccctagtcaaggggtaaggatgtcagtgacagcagctgcccctgttaaaatcttcctaatcctcacactggccaggattccaagccattcacaccactcctgctctgtatttttatgctgcagtgtgctctctgggttggaggtaggaggagggtggggcagagtctgacttcctttggggttcttttcatagttctgtagcatgcatgaggcagatagctacactggaactcagtccttagtggtgtctgctcatctaggagggtgaatctagagacctgcttcccaaggtctgggcaggtacttatttagggccagtcagctaattgtcttcttctcctttgtatttcttttcagagtctgatgcgagccctacacctcctatcactgtgacccacaaaccagaggaagacacttttggggtgagttacttcctgggttaagaggaacacacttaagggtggagccattatttggacttcatttgaggtgctaacttgtctacatagtctctcacttgaaaccagcagtagaaaaaaaaaaaaacagtgaaaattgatttcctttgaggtggtttaaactgtccttgtttgacagtagtgcttcattgtttgaagaagcctctgaagaaccggctccaagccccagggctaggaagagaacagtttgaaatttccagtctcttaggagtctggctgggcatggcttgcaaggcccattgactgggcaaacctacaaaaacctaaggtactcagaaactatccttatataggttttttttcccaagtctgtctcagagtctgaggtttccctggggagaaatagaaaggagtctcttgagttcagaactcttgaacttttctcagtagaaatgctatgttttaagatttcagtgggagcatgaagaatttgcttgctcactgaaatactagacagatgtttctcccaacatgcaattgtgattctagaatggcctcaaggtaagaggggctcaggtaattgaattaggcaatgtttcctaatctagttgattaatttgtattttgttaaacaaaaattttaaagttttcttagggtctcagaaagactttgctccagggtacctgatattttgacattgtgacactgtgatatgtataggtgtcctggggtgcaagtgggaccctgaatgtaagcttctggatgcactcacctcaatggcagaggttttaggggatcctattctgctgaaatagatttgttctcatttggcacaggcattatttttggctgtctggggcttcctgtgactgctcctttctgtctgtgtttggcttctaataggtgtccatagcagtcggacttgctgcctttgcctgcgtccttctggtggttctctttatcatgatcaacaagtatggtcgccggtccaaatttggaatgaagggtaaggtgttgttttttcagtcccaagagttccatggtttccacctattgatcaaaagatactgtacctccatatgctctctgcgaaagcctttggtcactggaccttggtaactctggtagagatccctgtctgctgttttgggttattatggaataaagactgtgtgaggatctataggaaccaaacagcaatgctgaaaactactggttgctcaggtggacttgtgtgatgagcatagtttgaacaggaagatggttataaggcaaatggcaattcttttcattagtggatgatctaaggggctgttcatttgagtgaccctttccctgctctgtacctatctttggaatcttgtggtgatttagcacggtgaggtggagggtggtgaactcggatattgaaaagctgcccgtgctgttgtatctcagcacgtagctctacacagagtcctggaatagatgccaagagcaacatggtttctaaatctgctggccagcttccatgtacagagcactcaaccccattatggcagaagtggagtgctggcatgtggtactctgccaaagcttgtaggaggcatctggcacgagaggggttaatatggcgaattagcatccatggatgtggctaaatgatctgaaagaaactgggtattactgattccagaactgaaccttgatttttcaagatgacttctcagctggggctgtcatgcctggctgatgttggtagaagtgggtagggagggagaggtaaaggttgcttaagcaacattcatgatgatgtttgcctgtggcattatgaaatccagaaagatgaactcctaaggatttaatacttgaagctagtttcttcagtgggagtcttgaccctggggaccagggattaaaagcagagagcatgaataacattcataggaacagacttccatggattcacatgcaaatgtaaatctttgtgtgactgtatgtggtgaatggttgagtatttgtacattaatcgagctagactttattacacattcaaggttctggaccttccttaaaaggtaagagcactggcctataggaagctacccataaatgatagaaagagttgaaatgtgagccaggtgaacttgttctcctggaggcttctgcctctgaacactttgctttgatgaatttgaataaggcatggatgaaggcaagccacattatctctttcttctcaacctccccttccacccctctatcctttgtatgtcctaacctctttcctctctcttctcctgttgttcctttcccccccatccttccttcacttcttccgtcctctctgcctgttttgcagaagccaggattgaacctagagaacttagatgtggcacataattgttctacctttgaattatacctccagcttttgtgaatagtttgaaatattctgagtgagagaaatacatgtgttggtaatttccaaatagaaaatagtttttaatggctcaaacaagtctagactcctcttgggcacattgactaaagacacatttttctgccagtcttaccgtttgtccacagagctccacaggtttagacaggatgactgcccagtgactcaaagcctgctgtcttgggtaatccttggaccactggcattgagaactgctgctgtattttttctacaactctgtcctttttatccactagcaaatatcaggatgtggaccaaagggaagaatggggcattattgctttccccccaaggcagcacaccagcagctgagaccctgacacatgcctggcagtggtacgagagcagattttttctattaattgtcatcctgtttgtggaacagtgtgtccccatgtgggatggattaggctacatctaggatggtgctcccccaagctgtccttggcatctccaacctcctgatctccttttccaggctgagctgccttgtttcgtcctgattggtccaggagactgtgtccccacacatagaaataaagcatctctctttctaaagtcaggcaacctgaagctagggccaaggtgtagagagatggtctgtccaagagtgactaatattgcatctctcggatcttggtcatattccattttctttgggtttcccatcattttataaataaacaaatgtcatatatcacaaataattttgttcctttgttgtcaatggacatagctcttacttttaattttaatttctatggctagctcacaaataagtttttttttttgattcatgttttgaagggatagttcaccatggttgcagggtctcattgagtttgtaatggaaggaatatatggctgtgacttcttacttctgggctgatcatggtgtagagattactccactctttcaagcctgccatccctgtgatgatattgctcacattctaagtgggttactcttcctcagttaattctctctgaaaaatagttattgacagatcaaaggtgtgcctcaatattctaggttattctaaagccagttgagttgacactagagggtatcacacagggtccaaatctagtaaggaaaatgacagcccatgtaccagaaggctcctagctctgccttacatgaaccccaggtctttacacacactccattttcaggcttcaactttcaaatctgggtgagaatccatattcgttctttggcttccatatggttactcagaaattcgcagagcctctgtttcctcaagtgtaagttaggaatgttactacttagctatggggcttgtgagtgctgtaatatgtaggtaattggttgtgttagttagctacccatcgctatgacaaaatacttgatgcctcaagtatattgatacttgaaaatatcaatatattaaaggaaaagttactttggatcatggtcttaggggattttagctgattggtactaagtttatcgttgagaagatgcatgaaggaggagacctgctcagcttatcgtggcatggaagccaagagaaacccaggggagactgaagtctcagattccccctcaagccatattgctaatgacctaatgtcctctttctaggctccacccagccatggctgctacttcctattagagccacagcccatgcctttggcatattgtctttagggactttgggatctacatcataatgttggcatggaaagggtttccttgtcttgtgtttccctcttctttcttttcttgacgtatgagtctttctggactccttttaatgtccttttgtgaaaatatagcccccaaggctccatcatgaacccctttgtctcagacaatatgtagtagtaaacatgtccgtattacacactgcccacagtgcactctcatttttccccctcacatatcatctgtctgtcctcctgggcccggagcaactttcggcaggagccatcgatctcttggcccagcgtgccagaaacttcattctgcatttgacaggtgcttgaactcagaaatgaaaagcatccattttattcatttcatttgctttttttttttttttgaagggattgctgtgtagcttaggctggactctaatttgttttgtagcccaggctatctttgacttcatagtcttgcttaggctctgtactggctggttttatgtgtcaacttgacacaagctggggttatcacagagaaaggagcttcaggtgatgaaatgcttccatgagatccagctgtaaggtattttctcagtgatcaagggtaggagggcccattgtgggtggtgccatccgtggcctggtagtcttgggttctataagaaagcaagctgagcaagccaggggaagcaagccagtaagtaacatcccgccatggcctctgcatcagctcctgcttcctgacctgacttcctttggtgatgaacagtaatgtggaagtgtaaactaaataaaccctttcctccccaacttgcttcttggtcatgatgtttgtctaggaatagaaaccctgactaagtcaggctccaaagttctgtgatctcatagaccttctttatattagttttaatcacgagggggaaaaagtttattagtctgcaaaggactagtccagattaatttagaaatctgaactattgttgtgggggagggttgggggtgctcccaaacagctcatgtggatatggagaagagattgaaatgaacctcatcatcttttgagaaataaaatgtacaggaaatcacaaagatgactgaataaactaacaatcacagtcccactatttcaaatatttaccattttattttatacttccattgaatgttttattcttagaacagattaagcatggcgaatatcctgaaaaccatgttaactaccacctctgactctgtttcctccctggtcacagaggtagctgttgatgtgggctcacaatgcagctgctcccttgtcttagtctttctctgtatcctttctttttcttttttaaatattgataattattttatttataaacataaagataatattattttgtctgaaaacactgcactttgaaattatgcaatactacagttagtgtttttcttaccatcaatttcagatcttcccagtaaatcccttgtattttgttgcctgactctaaaatcaactcatcttcaaccaatacaatcgtatggtatgcataagtaactctatcacgacatgtcccaatgcatatgtctactcactatttctatgcacccagaagatgttccaactggtaataagcacacatgctccactatgttcacagcagccctatttataataccctttctttttcatatctttgctgtttctacataccaatccttctgccaagggccatttcccagcaaatccatatcatgtacatggctaaactggcacccacctccactaaataataacactgtattaggctggtaacccattcatttgtatacttctaggtatatgcatgtttatacatacagatatttctataagtatccatgtgcagacttatacatgttgtatatttgagtacatcatttataaaaatgtattactctctttgttttaatttggatgcgtgtttattctctccccacttgcattttgcctactgtcttgccaggtatctcagaactgtccatggatttggctggacacccactttttggaagatgagcgtcttagtcagatatgaactgaacgtgtaatgtcttaggcccctcattaacaacttccaacccatccatcaaagtcttggtctggcaatgtgagctcatcttcctttggaatcataaaggtttttaaatgatgctgaacattcggctagggttcatctttgctactgatgaagcagagtggctcagcctggcagggctgatctgtgaagtatctctatggccagggatgggatcaatcagaaagacctcctactggagcatggcctggcaggaaccctgcctccactgtgctagcccttcactctttgattgctaaatcctggggtgcctgggccaggtgaggggtgagtactgtgaggttcagggcaggagggcacagaaatatacaaaaatttttcagagttttaacagtaattatgttgtgctaggtgtttgctggcctgggagaggggtgggaagtgttatgaatttatgataagctcatcttcacaaaatattttaaaattagatattagaagactcgggtttatgatctggctgggcttccacatcagaagaaaccgtggcttagaacagggactgacttgacataaccccaagctgctctgttgtgaccattctcagtgcacctggcatcttcatgccacaaccttgttagaacaaaagccagataaaatctaatccatttgagcaataatagaatacactttccagttttcgtatagggagaattccttttgagaggaagaactatgtgtggcctctgactccttttcttcatggccatttgaagatcagtgatgactagaagattcaacaccatggcctcctgaggtgctctcagaggaaacagttgtatggttttgaagaaccgaaaacagaccttgggcttattaggataatgacccctttttgcagagaaaggaaactgagaccccaagacatgcagtaagaagccagagcgcccctctcccaaatacagcagagaacttctgggtctgtgttcatttagagatgatgcattcagagatgatgcatctaaccctggagtttagaggtcaggtggggtggagggtttggggacatccacatggtgatggggtggggtggggtggagatgtgggatgtgaagcggttggatgggtggnnnnnnnnnnnnnnnnnnnnnnnnnnnnnnnnnnnnnnnnnnnnnnnnnnnnnnnnnnnnnnnnnnnnnnnnnnnnnnnnnnnnnnnnnnnnnnnnnnnnnnnnnnnnnnnnnnnnnnnnnnnnnnnnnnnnnnnnnnnnnnnnnnnnnnnnnnnnnnnnnnnnnnnnnnnnnnnnnnnnnnnnnnnnnnnnnnnnnnnnnnnnnnnnnnnnnnnnnnnnnnnnnnnnnnnnnnnnnnnnnnnnnnagtctcattttgttcccctgactgaaacactttcctttacttccttctgtataattaaagtctgtggaccgagggaagctgtaaggataggcagaggggcgtcaagaaatgcagcatgaacttttttttttgttttcatatagaatttttaaaaaatatttttattacatattttcctcaattacatttccaatgctatcccaaaagtcccccataccctccccccacttccctacccacccattcccatttttttggccctggcattcccctgtactggggcatatacagtacagcatgaacttctaacagtgccttaagcgcttctatcagcctgcttgctttttgtcttagcagtgggatgtgtgcttgtgcctctgatgaacccgtgggtgaatgagggccatacagggctgttccattgtaaattagagctggctaataggtacttatagcaaagtggttgcctatttgattatgattgggaagtattaacatttttccccctaaacagatggtaactatcctctgagcggatggtgggatcatgccagagtcttgatttggaaggactcgctactgccagatcttgggagctgcttttacagggagtgttattgccattcctctgattataccatgcagttaaggaggaatgggacttggggcggggggagtcatttctgattcctttcttggcctggaagtattggactgagattggtttttctccaggtagatggagggaggagtaggaggagtcttagaattctaaggttggtgcagtcttggcattatttctcagctaggataccatggccacatgtctacagctatgtacacagagcaggggaattgatataaggagagtgtgtggggaataccacacataggagacactgaaggcttttagagggagttggaccctgcatggacgtgccaacagtgatactgtttcagagctgctcccttggtcctgaaacatatattgttttgaagtctgtttaatgggatcagaaactaagagcagtacatgggagaaatgaaaccagagatggaattgggttttcctaacttcctgggatgtgcccagttctccacaatggttacttctttcttaacctttgggcctatatcctcttccagttgacatgtgtaatggaggaaggggccccttgacccttgaaaaaattgtgtacttggggttcctgggctgggactcttgatataagatgactctttggacatgagtatgagaatatttttctgcttttctctctgtgttgtcatcggagtcacatgtctctgatgtcataaggagtgtgtttcagttagccttttattgctgtggagagtcaccatgaccatggcaactcttataaaggaaaacacttaatgacagagagcgagggctggcttaaagatttagaagtttagttcattatcatcatggaggcaagcatggttgcatgcagacagacttggtgctggagaaaaagctgggagttctacatcagcagaaggaaactgcgcgccaaactaggcctagctggaacattgaagacctcaaggctcacttccacagtgacacatttccttcaatagacttcaactactccaacagagccacacctcctaatagtgctacttcctatgggccaagcatcgacacacattagtctctgtgtgtgtgtgtgtggggggcattccttctcaaccaccacagaatgttttcattctctttcctggttttctgatacctctggagatactccaacttcaagagcccctaaataactctctgtatttggacatggcttggttaaataggttatgttgtggcaagtccccttgccatgcctgtactttgcacgtgcagacaaagccttactgtatttgaggactaaaatctacaatatggtgcccgaaagcttcaagaaaagggctttgagtcagcacatgttgttgtccggcatgcctttgcttctccattctttgtgtgtctttcctcaggtgtgcagtcaatatcccagaagtcccttcatggccatcactggttatatggaggcctatctgctccccttcttcctttccttgtgcctaactctctgggatctagggagccaagagttcttcagcactgatttttctgtacatgaagagaaatccctggacatggagtgctatacaacatgttttcctctggggctacctgctggctgctctgttcttggcaggccactgtatcctgttgagctgtgccaaggatagccagtatgcttggctctacactcaaaagctattgcctctaggattcacttactgttggcagtacagtgtggtacttactaacccatggtattgtcactgcctcccaaagagttaacaggcttttgatagcttagtttagaagctctcagccttttgtctccagctactcatgtagcagaggctgttcacatgtcttatgcctgtgggtgtaacctggctctcctagaagtcctgaccttcacaataaatttacacccaagaaaaatggatcagaagatgtgtgagcaaatgggattctttagaacgaggaatgaaaacaacttcatgctatttttgatcttaaaaatatccactgacttttgtatattatgtatatgattttgtatattatgatctatcacatacactctccatattggtctatcccatccaatgcatcatagcatggtaccaatatggaaaaccaagaaggttgtgggctgtcaatcttatggtcttctttacccaagaagccttttgcccctgcaaaatcaagtgacagaaactgctccggagagccctacctctattctcatggcacattctgtctctgtgtgcatcctctcctgtgggccttgggagtttagtttgctcagaggaggtgtttggctttgactaatgaaaagctgtcatgtagctgcagtattcaactctgtgtttgtgtagcctagtctcctgtgaactcagcttcaggacgcccaaagaagctgctggcagcaaagcagatagagcaaaacaagggctggtcagaaagcacaatttggggttagggaattaaaaaaaatcatgctaataaaaactgccacagagccaactgctacaaatgctcccccaagcaccttctggtctccagcttgcatgctgcacgcccgtcattgtgatgggcattatgggggtggtggagaagtgtaaggaggaaggacctccttcatccagaggagcttccaacatctggtggtatctgccaccggcttcaggcccagatctccctagttgagcaagagtcccaagtaggtgtgtatctacctcttgccctcagaaggcttaatgacaccctctctatccctcactacccagtatgcttaaagagcaaccaattgagttttcatcctgcctaacactttattctccgccttgcataaacggtgcgcccacaaaccagagtagggattcatcacttgcttcctcccccaaagcaccaattatctaatttgtgggacacagtgtgcatgttcaaagag

SEQ ID NO: 1047 - DNA, 1511 bp, Mus musculus
atggatgtctctctttgcccagccaagtgtagtttctggcggattttcttgctgggaagcgtctggctggactatgtgggctccgtgctggcttgccctgcaaattgtgtctgcagcaagactgagatcaattgccggcggccggacgatgggaacctcttcccctctcctggaagggcaggattcagggaacagcaatggggaacgccagcatcaacattacggacatctcaaggaatatcacttccatacacatagagaactggcgaggcctgcacacactcaatgctgtggacatggagctctacacgggactccagaagctgaccatcaagaattctggactccggaacatccagcccagagccttcgccaagaacccccacttgcgttatataaacttgtcaagtaaccggctcaccacactctcctggcagctcttccagacgctgagccttcgggaattgagactggagcagaacttcttcaactgcagctgtgacatccgctggatgcagctgtggcaggaacagggggaggcgcggctggacagccagagcctttactgcatcagtgctgatggctcccaactccccctcttccgcatgaacatcagtcagtgtgatctcccagagatcagtgtgagccacgtcaacctgactgtccgagaaggagacaatgccgtgatcacttgcaatggctctggctctcctttgcctgatgtggactggatagtcactgggctgcagtccatcaacacccaccagaccaatctgaactggaccaatgtacatgccatcaacttgaccctggtgaacgtgacgagcgaggacaatggcttcaccctgacgtgcattgcagagaacgtggtgggcatgagcaatgccagtgttgctctcactgtctactaccctccacgtgtggtgagcctggtggagcctgaggtacgcctggaacattgcattgagtttgtggtgcgtggcaacccgacacccacgctccactggctgtacaatggacagccattgagggagtccaagatcattcacatggactactaccaggagggggaggtctcagagggctgcctgctcttcaacaagcccacccactacaacaatggcaactacaccctcattgctaagaatgccctgggcacggccaaccagaccatcaacggccacttcctgaaggagccctttccagagagcacagatttctttgactttgagtctgatgcgagccctacacctcctatcactgtgacccacaaaccagaggaagacacttttggggtgtccatagcagtcggacttgctgcctttgcctgcgtccttctggtggttctctttatcatgatcaacaagtatggtcgccggtccaaatttggaatgaagggtaaggtgttgttttttcagtcccaagagttccatggtttccacctattgatcaaaagatactgtacctccatatgctctctgcgaaagcctttggtcactggaccttggtaa

SEQ ID NO: 1048 - protein, 457 aa, Mus musculus
DQLPAAGRWEPLPLSWKGRIQGTAMGNASINITDISRNITSIHIENWRGLHTLNAVDMELYTGLQKLTIKNSGLRNIQPRAFAKNPHLRYINLSSNRLTTLSWQLFQTLSLRELRLEQNFFNCSCDIRWMQLWQEQGEARLDSQSLYCISADGSQLPLFRMNISQCDLPEISVSHVNLTVREGDNAVITCNGSGSPLPDVDWIVTGLQSINTHQTNLNWTNVHAINLTLVNVTSEDNGFTLTCIAENVVGMSNASVTVYYPPRVVSLVEPEVRLEHCIEFVVRGNPTPTLHWLYNGQPLRESKIIHMDYYQEGEVSEGCLLFNKPTHYNNGNYTLIAKNALGTANQTINGHFLKEPFPESTDFFDFESDDTPPITVTHKPEEDTFGVSIAVGLAAFACVLLVVLFIMINKYGRRSKFGMKGKVLFFQSQEFHGFHLLIKRYCTSICSLRKPLVTGPW

SEQ ID NO: 1049 - DNA, 400660 bp, Homo sapiens
tattctgtcatctttgcatcagagagtttacagattaaaagtatggcttctaattcaatctggcacaagggaatgaggatcctgccatcagcatccttcattaagcaccttcttttgcccccagcctctgcagttgccctcaccacacacgcaacctccccacacacccctctggctcccacctctctctccgacctgcatccacatgtgcatacccagcccattgggagtgcccctcacccacaccccaccgcaccccacccacgagtaaagcccacccgccccccgccacctgctccccgtgctcacctgcactgtccagcccctgaagaccccctcgcaggctggaggttcctgccaccctcagcacatgcccctggggaccacatgtggtgagttcacacacccatccccgagcccactccccatctctctgtcgctgcccacagccttccccaggcttggagcacacacttgttcaccctgtttaagatcaaaaataaactctctggaacctgttcaaaggttaatgtgcatcctcccttaattattgatttgttgattacagatgcttgggtaggacattcattgtgtccactgtgccaagggcctaactctagaatccctgtcctttttgggagaaagttggcccattgatcttttgggaaggagctatttgagtgttagataaaacctgtcctgccacaggacaggtcatagactaaatattgtgctccctgctgaagccctcattagccctagcccaggatggtctagggctatggctaatgagggcttggatggtcaccgctggggtcctccctccttccttcggtctcaaaaccagggaaaccctggcaaaggggtgtggggatgcagaggggcagaagtgcacctcaccaagtcccctgcagaggtggcagtctcccctttcctcattgcctcactagggacaatttagtgtaaaaagtggcacctggttccatgctgtgtttaggagaccagggtttaaaacctggcttattccacgtaccagttgggtgaccttggacatgtgatttaacctctctgattctatttctcaactgtaaaaccaagtatttgtgaggattcaatgaaatgacacacgtgaaggctatagaaaaatgtcacacacagaaaacagtcaatacgttgcggttgaagttattatcatcatcatcaccatcattctgcccatcttcatctctggggccccacgatcgtaagagatggctttctttggtccaggggatgcttcccttttggtatgtgggtgtggcctctggatggcttctgctacatttaaatctgtcagggacactgagccctggggcaaccataaactcttctggaaagaggttagatccttcacaccacagttctatggacatctccttgttcgttccagcatgaggctgggcaaggggagtgtggggcttgtcactgggaaacactggggagaggtctgtcatagggcacatgcacagtgggaaaatgtcactgccatccatccatggggttggactcctgggctctctttcttggagggaagttctagaacttgacactaggaagagggtgttcaaggggaactccaagtgtccgcagtgctttgagggtcatctggcttccagcagttggatgaactcatggtgccttccaggtgtgcttccaggctgagtttctaggaccccttccccatgcctcacattcaccccacagctttgagcatccgacctgagcttttgtcagggctggtttgcaccttcccccactgccaccttcattccctttcccacccccatcccagaactccctgggctgggctttctgttccctcagttcccaggcagtgcagctggtgctgtgggctggggagggggtggaggacgcagcagaaagtctgtgggagggaactatctcttagttccaaaggcaagcatggcttcccatgcccttccccacaacgcatcgcttcccccaaattcccacactggtgtctcagcaaataagacaacacttttttttttaaattttggttttccatttgctcttgatacctacttaaatgtgtgttgtgtgtgtgctgttctcagtaatcagtgccagaagaaattggagctgatctggtgatttcttgttttgagtcccaggtatctggcaaatatctggtctcctcctctctgggcctgaggagtttggggcatcacctctttggccctctatgctcctggagttctgttctgtttaaagaaacagaagccaggatagtttctagcaagcaaggagggtggagttgtgagcaccctaatagggaggccgaaccatctggtatggagcgggccccctaaggaagaatagtagaaagaaaaaataagggaagggagaactcctatgtatcaaatcctgggctaggcacattatgcacgttttatgattgccttctccaaactgcattgcaagggaaatatccatgagcagtgcccttcaggagaggaggatgaggctctgctaggtgaaatgataagcccaggtcaccagctagaaagtgctggagctggggttcaaaccagatttgcctggggctaaaactcacacttcataaagctgccccttggaggcgagagtgtaatgcatggtgtaaatggaagctgttgtcttggctttcctcaactctgagatcatctggttgttgataaatgcaggcaggtcagaggtgaagtgctaatcaagtgtgcaaaggtactggtgtccgctactcttagtggaaaccagtggctgtcatttgtgagtgttaatgtccacaaggtgttttcaggtgcattatcttgcttggtccttggcatcattggatccccacgtgacagagaaggaagtggaggataagagaaggacagtagcatgcccaaggtgatgcagcccaatatgctttgatgctaaatgaatgcattagtacaaagatgggtctgaaagccatagtcctataatctgagccagaggctcagggccagggcagctggaaggtgtggcatgggctgctttggtgaggagcaggtggagagaagggcaaccgtgggaggtggtgaggcagaggcgggagcctgggagccgagcaggagtgggctgggttgaccaagaagggcaataggatacagtgggggccctaggagatggggaggaacgaagggggaatgtctaacccagaagaagtctttctttggctttctgcagggcagaggccacagtaatggggctgctggacctgggctcttccctagactcagtgggaggaggctgccaaaggcccaggtggtaggacattgctgttcccaaccttctcttgaaaacaggagctgctaatctttctgcttctagaaaccccttgatatttgccttgttggggagaagtgtgtggcggcacatataactctggggatacagaggaagtggtcagctcaaagcacctcacttctgttaagtcccaaacttctcttgtggacacacatggggtttcaggcagcaaaataattcatttaatcttcccccaaaatatgtggtgtccatttttgggctagcaccaaagtaggccctggggggtatgtagtgaacaacactgacagctcctggccctcttggtccctgcagcccagggggaggcagacactgaacccttacttccatgtgtgtggagtggtacaaaagggcaaggtgtgctgggggcagccattcattcaacaaccacctagagagcccctctgtgttctcaatgccgtttacggggctggcaaatcagtagataaaataagcaaggtctgtgccctcaaggaagttacattttaaaacctggtaacaggaatatctccttgcaagtcaggaaggtgcccagacttctctgccccaccctgtcaatcttagttgcttcatctgccaaatgaaggccattatccccggctgccctctgagatgatccctggctgctctctcatcagtaaataggcaaatggctgggtattgtgcagaggaaggcacaatgtaagttactccgagagagctcatctaggaaggcacgtgagggctatgtctataatggagggtgggtgtggaggtgcaattctccagcctctccattcccctcagtccctgtcagtggtgctgcactagcctctgccaaccacctgcaggtttctggcttcctaaaagtgtgagtcctgactcttgactcctgatttcataccttgggggaagttggctcatggagtgggaatccctcttccctggctcccctaacctgcctgcagtgctcacctgctggcaggaagtcagctgcctgccctggatcctgctgtctaaggaagggctctagcatctgctcctgcagggcccccaccaggacactcagaggccagggaggccttgtgagtcactgcctctgcaggacctaggacgtgcggcattaaattcccagcccaactcaactgctcagagccggtggtgactcagcagggtctaccttcctatggaagggaccaaagcccagaaggagcaactcaaaggcatgagaaccagcagcgaggggctccggggctgaggagttgcatctcaggggagatgtacctgggcctgcgctctgtactttcttccccagggacccgagattcactgaaccctctctggcagcacaccactttggggtctaggaccagagccagagagtatctgtgggcggtggctgcacccgacccattgcaccaacttgccagggggtgctgcaatgtgtgtgggaagagcttcatggcggcattgtgtttggctgttagtggataaaggctgctggggcctccctgctgggtggtaaagccctctgggaacctcaaaagtggcataataaagttgacataccatgcttatgtgcaccaggcactattcaaagtgccttactgtgttatctcatgacaaccttgtgagttagatcctattttgcagaaggggaaactgaggcggagagccttaagtacattgctagggttcgatactagcgggtagtaaaccctacatgacaccattttagtcccattacagctgcttaccgcctggctccccaaggtcagagcacctcaagccggtgtgatctggagccatgctttatttaaaccgatcactttgacaaaccgaatgcatttccaatagctgtagtggggaaagatcagaaagctgtgcttttggagtatagggaaggaactgaggctttgctcagagaagagaggggcagtgagtagcctcctgggtggcttgcagaaaagaggtgagacttttccctgagggtctaggtggcagcactagcacgagggtggcagctttagggtgctggcttcgctatgtcaaagtcaaggatacccaaggaatggagctgtctgagaacagagtcgaaggctctggagtggctggtaatgagcttcctgccactgaaggtgttcaagcaggacaccaccagcaggtagtcccaacctcctggcaggtgtttgtccaagatattgggacttgagtgggagccctgagctggctcttccatggttgaattcttctgctttcctggaccactttggtgcttgactgtccccttttgtgggtgggctttcatcttccatgtatggtcaaaattctttccttggacccagagcttctggatagcattatacatccccagcctccaaccaggcccagacctgtctctttcccttgtaacttatgcttgggccacccaagaaacagaactcctcctctagcccaagcccagatctgccagctccagatagctcttttagaacagcaagtccttcaggacctagtattccctttgtagcccgctgtgctccccagtcacctcccagtatcacagtttcttgaccagctgagacttgcagaagtagatcctatttctgctcaaacttgaaagttgtgaagcacagctcttggattcagaatgacaccataggagcagggcatggtgggtgaatccatggacctgcctggtgtgtggcctacatcccggtaatgtggccactgactcaggagtatgggtcctttggaaaaagggatgtggctgggttagaaaggcagacaggtgaccaatagactggcagggctctgctctgagtttccactccctttctcccttgctaggtggaggggaatgtgggctgctggaaatctcccataaacagttgatattaatctcaggtgcttgcacgcctggaacatgccttttaagaaagacacgtgttcaatttctctaggtgtcaggggagttgggccactgtgctccagcaagtggtccccactctgacctgtctggtgaaagattgcattcgaatcttgggaacatttctgtcttctccaaacccttggtactggaaggtgtctgctcgcctgtaaagggtttctaaagctttactttctgttcaaaaaacaaaacaaaacaaaaaactttgcctattcctgcctcttattgatcagcaaggggcacacgggtgagtttcctcctttctaagactccagctggtagcaaaggagatgaggaggttggggggtgacccctggttggctggatgctgagcttggtcatgatatctccaggactccatgaagcgacaggcatttttccttttcaaccaggacattcttatcaagaggtgagacactgtaaatgctctggactcttactgaggggagggtgtctacgctggagactttcttctgctcccacatttaaatttggcctactgcagaggttaagaactagcaaactctgagtgtgcactattattgaccctgcactatgatttctgtgagcagtgcatgagcaggtcattctcatcttcttaagcttagaatgaaacttcaaatgtctttttctgacaaggcccctgcctctgagatacccagtttatttcaccctaacttcactgtaactgaataacattatgaggacccatccccatcattccccaccttttttttttttttctccctcaacagtccctttggcccagatccatgtagaatcagagaatcttcaagctgggagggatgactatggggctgcgatgtgcttatgaatcacctgggagcttgttctgatggacattctggtttgggaggtctgtgatggggcctcagatgctgcacttcttgcaagcttccaggtgatatggatgctactggacagagggccacactttgggttttgaggatctggtcttaacgtggtcattttacagatgggaaagcggagtcccagaaagcttgtcatttccctgtggttagaaatgaaattctgctcttccccactctagtctatcacctgctttttttttttaaacctttaagttcaggggtacgtgtgtaggatgtgcagctttgttatacaggtagacatgtgtcatggggtttgtcgtacagattatttcatcacccaggtattaagcctggtatccatgagttatttttcctgatcctctccctcctcccaccttctaccctctggtagaccctcatgtgcattgtcccctctatgtgtccatgcgtcacctgcttttgaaagggcttccctctttttcagctgtcgcttcctgctcaggcccagagtgtgagcataaacgtagcaccccatcttaatcccattttactgtcaggatgaaagacttcttgcccatcagggccccttgctccacaatctgcatttttaccaaatccagaggggtttttaaaggttttttgttgttgttgtttttgttgttctaacttatggatgtctcttcttctctgcttgacatgttaaaaatcctctctctctctctttctttctctctctctctctctctcaaaaaagtgggctgggcatcttttggacacaaccatttcagttccaggctggagcactgatgctgggctgaatccacttggcgttccctgcccaggagtggtctgagagaggctgtgtttctctgctgccacctgccacctcccaagagaggccaagtgttaggatctgactacacctcagtttcctgactctcagatattctaaagccaatcccagaatggcacttgaagtgacagggaaattcccagtggcctaaggacagccaggattggcctagggccagtagcaagtggtttgagagtccaaggaggtcttcacactctgtccccgcctgctggtgggagggcaaaatgccagtctggagacaaggccataatggcgacgggggtaaaaatctccctggggccaagggaaggtggaacgtgacgggaagtcgggaaaactgccttgtataggcatgttcttttcttccatttttttcgtccaagtttttactccaagcgacagtgccacccgaaggcgaccggcctgtttgtggttgcgcctggggcaggcggtgacaccggcataccccttcccccatcttgcctgcaagttgcatgacctgcatcggaatccacaggggggcgggggagactcctttcagatactggatgcagttgaattgaattcaatgtattttgcttcctcgcctgccctcctccaagctcgggaaggagaaccctgctttcttctgcgtgtgaatgctgtagtgtgtctgcctgctcggactcccctaaccctttcttctcctttcccacagcgaatgctcgtttttttttttttcagcaaacagctcacacttggcatctttatgttttattaagaaaaaaatccctaccagcgcaaaagcggggccccccccacacacacttctttcccggatgagatctgagctctcgtcgaaagctgcacctgctttgcgtccctaccaggaaggggtgcttgtgtgggagggaaggaggaggttctgcgcccccgaatccggagaaagcagcccgcccgccccctcacccggcagccagctcagctcacccgagagctgagcccgagaagccggcctctgacggtgctggcgtggcgcttgccaaaatatgccccttgcatctcaatttcccccggccatttctcttgcacgcacagctcgcccggggccacctcggctctccagcgcagccctttcgacccctgtttcttccttccccgatccatgcctgctcaaggccgaatgcaaaacccacctccaagaaagcgcagcgggcacggggggcacctagcgtgccatgtcccgcagtcccctcccagccaagaccagagccccagactctagattacggaaatgagtgtcattcagaccaaggactgcgcgtctgcggtcccggtccccggctctgggtgcttctctggggtgtctgtgcgctccggcaccccccgtcgccgtccgtgagcctgcgccccccacccacccaggcttgggagcgccccccacccaaggcttgggagcactccccaatcacctccgccacgttcatttcacttcctaccgcggtccggattgcagcaaaaccgggtagcgcgagggccaaaaagtggaaaggagagcgcctttccgtgtcgtgcagccagctcgccaactctccctccccagccccgaccctcgcaatctcaaatgcaactttttcccttcggtctcggtttcccccgggctgcggctagcgggcgccgcgctgcgaggcgtggagcgggcgggctgccgcgaggctgcgggtggcggtgccggctacagccgcgagccggcgagtgggtgggtgggtgggtggggaggagggagaggacaggcggggagagagacgggtgtggggaggggagggagggggagattccgctctcctgccgctcccagcccgggcggggggcggggggaggaggccgcgacgagggaggggaggagggagggaggaagggagggagggagccgaggaagacgctccgataacccgtgcgtttcgtaaggctcggagcacttgtacatttctgcagccgcgcggcgagccattcgcggcggctgctgcagctcctactgcatcttccttctcttcctttcctcgggctccgggtgtgtgtatgtgtgagagtgagtgtgtgtgttttgcaggtgcgtggtgtgtccgttttaattctgcccagtaggtgggacttggtgactttagcaccattttttccttttccttttttttttttgcctccccaccgtctgttgcaaccctgcaaagtctcggagtcggagagcgcgcctcgcttccagagcccccggacccggcgagtcagcgatcgccgagccggccaccatgcccggcagaccgcgccactaggcgctcctcgcggctcccacccggcggcggcggcggcggcggcggcgtccgcgatggtttcagacgctgaaggattttgcatctgatcgctcggcgtttcaaaggcagaggccccccctcccccttcccccctccctcgccgtctttgtttccttccccccctgctctccccactccccccaccccacccccctctcctctcctcctcctcttttttagaagcagcgatcggagatggatgtctctctttgcccagccaagtgtagtttctggcggattttcttgctgggaagcgtctggctggactatgtgggctccgtgctggcttgccctgcaaattgtgtctgcagcaagactgagatcaattgccggcggccggacgatgggaacctcttccccctcctggaagggcaggattcagggaacagcaatgggaacgccagtatcaacatcacggacatctcaaggaatatcacttccatgtaagtcaggcggccgctccccagcctgcctcccccgcgctctgcgtctccctcctgcccacccgcggccgggagccggccctccgcccgccccagctcgccgctgcccgccgcccgctgggcgcgcgtcaggctcgctctggctcgggagatgctctccggctgcgcattccaggtgactccggccctggcgaggcgcgatccggctatgcgtgtgtgtgcctctccccggagaggaccccggccgccgagggcacgcggggcccagctaccgcccgcctcccaaccagttgctggctcgtttcgatggtgcaaattgtttttttttgctccccactaaatagcaacagtttggccacgctcaagtggaataaagtagacgaggttcgattctttggcagaggcggcagcggcggtggcagcggcggcagcgcttagccggcagggaaggtgacagatagggactgctcgcgatccagccgaggtgtttaactatttccatttggaaacagcaaaacatgctgacaagtaaacaagttgcgagctggctgctcgcggggagactttggacgtgtggaggccgtcatggacgcctacctcttcccttcccctcctgcagcccgccctctccagccccattttgggcatttccgagacacccctttgccaccctcatctgcatctgggcgcctacagatcccttcccagtttgggctttgataactgctcggaactattccgagtcaggatggcgcagggagaggagagggcgtgtgttttgaggagaggggtttcttgtgtgatcgtgcggatcggttcatttggaacattcaactctggctggcttttgcttggttctgccccctccgagggagaccagtggtggcctgctcttttctccttgctatttttctttggtggggatggcagcagacgcaaaggagaggacagatcgagggctggggactggagagtctgctcctcttttctttcgttgacctcggccaggtgaccccttcctaacctaccaccctggagaagggtgtggaccatactggaattgctcagaggataattctcacctcttttcccccaaggcttccagcccttggggaccctcagcaatgggtaggcagctgagaagggtttgtgctgaggtcctggccaaggtctggaggaaggcattttgggtggctctttaccccttcgacggacttaagggggccggacctgcctttggtgctgctctgggagcacctccccttgcttcagcccagggccatggggctgcaaagcctggaggaattgcagtcctgctctttggaaagcccaccagccctctcggcttaatggagcttctgcttgcgctctcgcagctgacagtttgagggaaatggatagcccaggagatgtctctgactcctggcccaggagacaagcttgacccatatctcagctctgctgttcacccccttaccctcttcaacccggccagagatgacaagataaacagccaaggggcgggggtcagcagggagggcaggaggaacaggacagacccaactgtgcctctcccccactgcaggccacaggcttccagcattcccaaggatgcagggagaagggttcagagtgagactgttagggaaactcagacttggaagtgcattgctggggctgtatgtgtatgtgtgtagggggtggatgtgggtagtagggtgctggtgaaggtgggagctgagcagccagtcttggtgctcagaagcctgacctagagattgccaggggtgggccaagggttggaagaaggggcccctggtacccagcctgggtctctgggaatgggtgagctgcatccagtgtgctgctccaaggatgtgtctgtctgtagaaagccagtgggaggcagggatggtcacaatcacgtaggctctttatagccacacagaggtgttgctcctctgaaaatgatgctcagggaagcagtttcatagggcagagttgggttagcctttctaggctgccagaaaggtctgtgatgggaggggactggggtggcctcttgccctctttggtactggagggcctcaggagggcgtctgggaggatagtgagcagggagtggatctggagcccctctgtgtgtgtccccattcttgtttcaggacttggattctgagaggccatcaggactcctttctctaaatccacccaacaccaaagaacaagggaaatggattcccacaggagctgtgccagtggcaggtgggggagggtcagaggtcatgggtcaaatgacctctccttgccccatcttttccccagtgccctgttatatctatggctggtattgactgagctcgagaagagcccagatttccactccagagccagggggctggagagagggcggagagtcacgcttaccccggaaagtcagcatccccatccctgtttgacttctgaggaaatggaggcttggggtggtaaggtcacttgccccagacacacaatcccaacaggaacccccactgtgtggggctgcatatggagcaggctggaagagggatgtgcgggcagagagaagcacccgcagctggggtcagttcttgttttagtatgacttgggaagagggcttcagttgaagcccgtgccttgctggagagttgttcttcagatttctgatgttatcaaggaaatgggaccaagaggtcccctagctccctactggcctgaagctcttgatgctggtggctgccccagggtatagcttgggcacactctgggtagaagatgctgaggcctccacagtttcaccctcttgttcttcgggctgtaatgtttcgagatccttccttcaagtgctgaactgattgtaactgagtttccagagggacaagaggtttccctgtggttctgcttctcagggatggtgtgtggagtgattcctgtgtggccatccaaggaagctggctgggaactgcctctgatgggggaggccatctccccattcagctgccctgtttgtatctggaggaaatcagttgcaaggcatcagagcataagtgtgggtctcacctccacccctcaccagagccacgctcctccaaagggccctcccttttggcccctttctgcccaggaggccaatccctttgcctttgcagctgttgatacacaggaacctcatggagcctggaagggtccatgcgcagccacacccaaccaggctgtgacgtcacaaaggcaggagggtggtggccatggtggactgtctgggccgctttgctaggccaggcctacctggggctgggttggagtggtatggtctttagctgttagaaagaagatgaagtgggagaggatggcatggctggaccaggtatgcttggggctggctacctcggcttgcaaagaccacgggctcttagctgggactctgagtcgccagctgggtctcactctgagccgccacagggtccctggcatttggcagctctctggtcccttcatttccatggccctccctgaaggccctcttctggctggctgaaggatcattcggggctttggccgtcatgttggctcctgagtctcattctttctaaggatcaaggggagacccagccttgacaatgacccagcagggtatgagccaggccccaaaggcatcatggggctcactctcggtaggcacagtttggtgctcagaaccccaggattaggactaggtctgagagaggtgggcagaaatgtgaggggctgttgacatgagatttggaagcaggagtagttacagccccagagaaaggtacttccaggatcaaacctggagaccttggtctcctgaggccctggggttttccaccaaggaaaggctattggtggctccagagccaagaccccctgccccaggaagcccagcaggtcaagcttctgtcatacaccctggggccaagggcatctgctctgcacctccatgggacctgaggccatgacagctttgggcaaaaaccagcccaacctggccactgctttgaaagtcctcatctactggccccaggaaggctaagcctgcaacctggaaggttccttagggtcctagaaggctcctactaccctcctgcctggctgaacaggaggtgctgctgtgagaaagggagggcctgtccttgccttgccagtccctgccagctgctgcttctgtccaactctgtagaaggaccagggccccaactcagctggctcttgggtgggtgtgggtagcctgaggccctcctttggtatggcccttgccaatatcacggcatttccactgtggcctgggtccccatcccatgtgctcccatgggtggcttgcacagaagtcataggcatggtctccagcctcccctcggggcctccagttggctggtggcagagaaagggatggatcatgtgaatcccaccttggctctgcccctaactccctgtgagctccatcagggcactctagactttcagagcctgtaaattcaactatgaattgaggccgcagggcagagtgtttcttccaacttggacatatgtcatctcagggcccagagaacttcccccaggaggctcggccacgccacttttaagggcatctcctggggatggcagtgatccttgtgatggtgccaggaggaggtgcactccctcactgaccttgggacagtggttattctcctcttccttcccttcccacctctagcaaactcaggccacccagaatttgacaccatttgtgacacatgacactatttagagtcaactgcccagaccaaatggcatatttaacaagaatgtgctggggcctgcagcctctcattagggcctggacacccagcttcgtgactccccatctgcaccctgggctcagggccaggaaaagatgttcttttgcaaagctttcagcccattgctggagcacagctctccactgggtgtgagaagaaaacactggaacttctattgcaaattatttttgcctagaaaagaggatatttcatatttaatgtatagataatagatatataaacatataaagtaataaatatgagtgtttggggtttataaaataaactttttgattgctaaatcatgcatgatcaatacagcttggtacccactgctcttgtgattgggagggttggcacttgagaaggagacagggtggtgacagaagaggtggtcctgaagcccctggctctctcttggtgctgggccaaggaacggttgattaataggggggtatggttaatgtgaggagggaataagctgggtggggtggaggatctcagttccggatcagagttcccaaggcccaaaagccccctcgcaggggccaggccagctcttatgaaacgatggtctagtgcctactgggatcctaccttcttatccttgtgtagcaaattcttcatctccacgaatgcccccatcagtcatatcattatttttagtttacaattgttgagtttatttttgtgacagttgcttggcatataaaagcagagcttaacagtcccattttacagatcaagaaaacaaaataaagaacaaatctagtgtcccaggtggtcatgttgtcatagctcacaaatggaaaagtccagaggctctcaggagtctgtggttcttctggggcttctcttaccagcttgtgggtccccttggctctgttctttcttgggcgtggccctttcagccagacattaggactacgcctgagagaggaagacagaaatgtgaggggctattgacatgagatttggaagcgggaatacttacggccccagagaaagatacttccaggatcaaacctggggaccttggtctcctgaggccctggggtttggcttgttgggaaggaaggtgcagagcattttcatctaggaagtttttttccacccaaagggcagcattgcgggaatgacccatctttgagggacttgcaaagggcggctgagtgttcagcaactggtcaaagagtggcccagatagaggctggactcagtcactcagatgctggtgatgaactgagtgatcagctcatgtcatttgtcattctatgaacctcgttgacctcaactttgaggaacacaaatcctcctggtggcccggtgtgttggaagctgctcgttgatgggttgggtcataaggagtgaagactccagtgaggctaacaccaaagctcagggcccagtggagtcctgagaacccccaaggaggctcttcccatttccgccgcctctaagtgcagggcttaccagaattcaaagctggaaaggaccactgcagtcatcttctccctcatgtcacccatgagggtccaagggcccagagtgggcagggactcagccggggtccctgggtcgctcgaagacttctcttcccgggcacactcccaggtgctggggccgccttctactcagtgctggctcttgttctgggcactttgtcaaagccagagcctcccccatgactgtgtctccctctgaggcaatgtttccaaattcagggtccccagaggcagcaactatgtgagactggcagccccagagctctttgcagcttgcagcccacaccaattagaaatcaactcgatgaggccttctgctgagctctgttcacatacagggctggggaacctggggctcagcagacttgggagcctgtccttttcccctggcctcacctctgcccccagtcctcctgcctggcttgtcccatcataagtgtcccagagtctgggtggtgggagattcaggattccttccccagacacgcatcatcaagcatggaggactctggcagctgctcttttcctaagcccagttttcccagcagctcctccaggcatggcctctccctagctttgaacaaatccctttcctcctctgggtctcaatttccttatctataagaaatggataataataacaactacattatgtaagcaccctgttgaagttcagtgccctgggtcatgtctggctaagagaaatctgtctatacataactagtgacagctagcatctactgagtacatgataacaatcgttagcgtttctgaaacacttactatgttctagacactgtgccaagcactctaaggctaatacctcattgcagcctcacatcaaccccaataagataagtactattattagcctcattttccagatggggaaactgagtgcagagaaggaacttaactcacttaatttcatgcagccagtaaatgggaaagcagtctggcatttaaatattaagctatactgcctatgctcttttgcaatactcttatgcatactagcatacacatatatatgcacacatgcacacacacacacacacacaaatatattactattaagttaaaaataaataaaagagttgatgtaaaagtctaggagaatcatttagtttacaacatttcagttacttgggtgggagttaccctggctgggatataaggggaaggcacataggataattatgggtgtagtattggccaaacagtgtggccaacactgtcccaggcaggcctcttagtagtgggggaggcttttggtctctccttctgacctgttcccaacagggagtttctcctgaagttgtgtctcagccacaccctcttcccaggcctcctcatccaccccatgatgtcctggcctctgaggtcaggtcagcccacagcagaacaggtgccagctgaggctggctgagattcagaaagctggtggctgggtcccagccagctcctctctgggctgagccgtggtcagcaggactatgcccctggtgctcatggccagcgagagcctggatgggagagcagagggctgagtggcttctcccaggtagagctttggggtgccaggagcatttctgggtgcagagcaaaaggggggtgtctaaagcgctgggcagctggagctggaagctgatgtttagagcttctttctgcgtccttccctggtcctctccacaataagcagcctttatccccccgcgaccttaccccgcctctctaccttcattgctcatggaagctccatctctctctccatagggatgagctcttagtgtgggagacagatacaactttcttctgtgaaacagccgaaactgtggggcagggtttggtgcattttccacgtttgctgcttcttggctgtgtgagcttgcttcatgatcgctcagccactggcctcgcacttctgagagctgaggtcatggaactctccagcccggcacccccgtagggtcactgtcatgttcagacctatgcaatgatgtattcgctaggctctgtaaataattgggcaccacgttggttatttccttttctagactactgggaagatttctgagttagagagaagatcaagactttgaaccataaattactagatctggaaagggcctcagaaaatgttggggccaaacactgttttacagagaaagaacttaggaatcaagagaggtgaattgatttggcccaatcgcccagtgagttcctggcacaaggcagcccagaacgaagggccctgcctcgctagctggtgtgggtctccatccgcctgttggtgtctgctctgggactgaggggttcgggcttttacaggcaggcggggaaaggagctcttagagtgctgcagagaagaggagaacacgaagggagcaatagtagcttcgaagtcctaaacccggctacctgccgcgggcaacagggctgcgtgcgtgtatctgggggagtcttggcacaggcacaagtgcttctcttctgtgttctgtgcacatcgtgtctgaggtctctgtaaacagaccttaaaagattttggcttccctctgcggctacactcctggtggccaccagagggcagtgtggcgcacgagacggtcctgggctgatggcttcctagggcgggagccgggcgtgtggcgctagcctggtgagaagtgcactgtcagccctggctttcagagcatttcctgagccagggctgagcagagaggtcagctctcctctatgaggggcatctctccgccgagatgaccctgcttccattgtatctctgcagtccagggatgtgagactcctggacccggactttctgactcatgagcctttggcttcctgggaaggaggtggctgggcgagtgcattggatggaggaaagccacctggtgtgctctccttccagccttctctcagcagcagcaggagagatcagcacatttgcacagagggtaatggggtgaatgcatggaaggtagcccaggaagacccacaggcttaatagagaagttgacagatagtttcactgtggggctagtatcatggaggaagcgagctttatacaggctctcaggctgtctgatgccctggctgaagtgtgggggaatctctcccctctccctgcccccaccaacccaagcttggaaattaccggacgacaagtagtgctcagaaaatagcaggtcctggcattgactagagatgagagcttggcgccttctcttaacctctgcagatcccgtgtctgctttaggagataaccatacacagaggtggctacgaaagtgccttgcaaaccagggccatgggccctgcctggactggctggttttgacagtgcttctgagagtatcgttggctcgtctgtctgttccaggcagtcttgtatttgagcaggtgctgtcttgttccatgcacaaatgagcgtcctcctactaacaaggttatcagctttagagacagggtctgctgcttttggggtgggtgtggagctctctggtctggggcctgtgactctttcttgagggtctgctcccagcttcctgacctggggctgcaggcagtgttctctctgttgtggtccatctttccccacttccttatttctgatagcttttcaaatctggtccactgaagagaaggaaagaagctgacattatcccttctactgggccagagatcatttacatatacaaccctaattatttatggcaacgactaaatgaagctttagatcatgactctgcctcttacatcctgagaccctgggctggctacttgaccttgttgatcctcagttttctcatatgaaaataataaacataaggcaggactattataagatttcaatgagcacgtgtgtgtgtgtgtgtgtaaaactattttctctgtcttcctattactacaccccagaacctcatccccacaagcatggatactttttatagccctcatctgttcttcttgcttccagtctctctgcctctagctcattttccacaccctaacagattaatcttctaatccagggtatttggttagaccaattcctgcatcctgaacttttcatggtccctttgtctgagaggtggcatggtgtagtgggaagagtagaggcttctttggtcaaaaaactcagtttaaatcctggctctgccctggtataggcttaggcacattacttaacttttctgagcctcagtttcctcatctgaaaaatctggttagctatacccatctaatagagaggttgtgagggttgaatgagattatggtaggtgcctggcatgtgatggctccacagaagccaagctggtgagcagtccacaggagtctgtaagaggtgatgggcagtgacatttccaggtccttgaagaatgggattagaggaagttgcatgagggaactagcatgtggacaaagctgacggaggcaagagaaggactaagatggcatgtatgtggaaaaagggacacagtggctgaggtacatgccttccacagggacagggagattgttatggctcctgctaagggactcctttggaataccaagtgtcagagtgtcccaggcaaagcctttaactacctgccttccccactctgcagccccagaaatctggatgccagaaatctctatctagggtaatttagtagcatctagcttcttgcagatgttgtcccaagtggttttattgctattcttgccttacatagcttcccattcactagctgattccctcttggctattgtaatccaataagtctgtctgaagagggggcttcaggaccatccctggtagaaagaatttaggaatccaatgggataggatgacctaaaatcctttcaatccactcatgagagcctcccatggacattcatcccagttccatataaagccacaagagggcactagaccatgatttctgcagggagggaagggctgttgagcctgtcctgatgtgatttgtacctttgatgaaagtctgagccccacttggttttttcccaggtgccatcttctctggggtcatggcaaaccagcttgattcagccagagcccatagcactgagactgatagctcaagggaggctaaattgtgtagtaaaaaggtcatggaatttggcatctgtctcaggttccaatccttgccctcctccttgcttgcttttttaaactgtgagcacgttatttaatttttctctgcctcattttcttcccctgcaaagtaagatgttattgggagagttgctatgagatggtgttgtgaggattaaaatacatgatgtggggacagcatctggaacatgatagaacagcatctggagcagcatctggaacatggttggccatctatctctttctgggagaaatatgaagttaggtcacacccaggagatatgtatgagatccccttggcctgctggggtcattttaccccctactgaacgctctatggttccaattcatgggggggcagcagtgacacccagtggctggcatggagaacagcaagtgtattctgatcttgcaggtggtgtggtggggattgtccaggccaggtcagactgagtcagggttagtggatattggcttcagaggtttcattagcagaatttctccccttcaactgctaggtgctaaagatattttttttctgagggcattcatgtgatgatggctattagggatgtttcttgctggggcccacagtacgaagtcacaactggagaaaccacatgggcaactgactaagttgattgtgatgaaacaatcctggcacctaaaaaccagagcctttctggtgttttcctggggcaccactctttttgacatgctttcatacagtctatctggttggccttagccaagagactccagatctctgaacctcagtttgtttacctgggaaatgtaggggttggtctggttgacaaaaaagcctcttttagcttaaatttgagtgtcagacatgattgaataccttttgctcagtgtgtgtgtatgtgtgtgtgtgtgtgtgtgtgtgtgcatgctatgggggatgggatcaagtgagaagcaggggtaggggtcactgctaagctttgggctttactggtgaagaaactccagcctcctctcagcagaggagtagctctgaggctggtttggggtgaccctggctctcatccttgcagcctcttcatttctccacctgagatccaggagggagcgttggcagacgggccaggctcaggaagttatttaatatcagctttgctccagattgtgtttctgactccctgccacctcttaagtggcagtcatttgaacaaatgtggcgataagacacagagagggaaataacataagaagtggggagggggcaagggcgtggaggaggggtgcaattttattctcttggcagaaaccttgtctttgaggcactcaggagcaagaaagaaatggaagaggagttcagctcagggctcctcaaagtccctggtgttgaaggaagagggtggaaagaagggcctaatttttagggcctgcagctgcagctcctcctcctccgtgggagggccctatggcctatggggacttctggctcccatccctagggcaggtgttggaggggcggcctcatattctgttttccaaaggactgtcttccaagtgcataacagacagctaatgggggcctggcattggcggtgtgtgcagcccacagtgaatgctgagctgcatctgtacctaggctgtggggtgcccaggtgtctggccgcctgccttgctgtttgccaaagcccatcctagcatctggactgttggggaagaatgagcagatgcgctagcagggccagcctggctcttccttctgtgggacccaaagaggaggagagtctaccccctttcatcctagcgcctagcaccagctgtgggccagacccatgctgagccctggggcacagccttgagaaaataaaagaccgtgatacttccttcttggagctacaggtgaatggagggaggcaggtattagacaaatgatctacagctcaaagggttatctcaagagaagcgggggcagaattttagaaaacggatctaatgtaaagtttaaagaaaaatttatatatatgaaaatgtggcttccctaaggtggagagggtgcaattttcctaaatggagttttgaaaattctagatttacctgctcccaggtgtactgaatgtgataacagtagagtgagttgtcaagactgtgccccctggctgggaagttgattcattggccttgctgttgctcacagaggccccacgcggaaaggcaagagaagcgagtttcatttctttccttgtcactctgcctgtgtgagatgaagatttgggctgtgggtagtttatttggaaggtgaccccaggaagcctgggagggagagcggaagtgagacagggagggaggaaagccacgcatcagtgtgtccatgcgcaggtggctacgtgctcttcccaggcgaccgttcattcgtttctctatttgtgcatttatccaacgtgggtttattggagagtctctgatgggccagccacttgggagagctgggaaagccgtggagagcaggacccctgaggtctccattgtccctaggtctccattgtcgttctaggatgtgtgcagccgagcagcaactctcctggcctctccctgcacctggaaatcgacctctggagaggggaggtgggccaagctttgctgagagtgcacggcagattccgtccattcccggggccatgttctcggcagaaaagtcagagggctgtggatatagggcagcccttctccccagtgcgctgggtggaggtgagcctgggtgaggcgaggtgcaggtcagatgaagagagtagctccacgtggtattgaagggtagccctgcttcctgctcccagcacccagctggcattctgcccaaccagcggctgacctgccccatgccccctgctcctaggtgagactgaccagggcacaccctccctcctcctttccagcccagagcagctccctgggccctggggaagcagaagtggcaggagagtgacctcatgactccctgatttgcatctagggttcattttccggggtcatgttctgtctccctggaaatgattggttgctcttccctgcgcccatcacccccatccctgagctgcaggctgtgtctcccatccaggtgactgacatccccctgccctccttctgtcactcactcaggactgctgttgcctgctgtctgggcaggcatgctctgaccttgaggccccaccctgctgccctctactgccctctatgttcttacctgcccaggaggtcactgaacagaagagggcggcacagctagtgtctcagtccagctgacaccctcgggagccccacgatgtgtcctatatggcattagcttgttaatgttcctgtttcctcactgtgtggtgagctcctgaaggctggcattgaggcttattcagctctgtccccaagagcccccacctagtaggtgttcagtaaagacctgtggactggaacaggctcatttcctgcaccagaatgtcccccaggcccacagcaaccctcccagcttgctgagggcacacatgcctccatgcagaatgctgggcacaccattctcattgctctccacacctttgtgggcctcgggctttgccctcagcagggcagcccgttggaggaatcttctagagaaaactgagctcatcacagtgacagcaaatgctgtgtgatgactgctctgggggctcctttaaggggacttttattttaacccgcttccattctcagcacagtgacatggcaggtcccacgatcatcctcattttacaggggagaaaactgaggcacagggtggctaagtagcttgccctaggtggttctgctaggaagtggcagagctgaggtttgtctccagagccaggggggcagccctgtattacagacccctttccatttcctgccagccccagcctcctccacagtaagcaggcacccttgggccgacaggacacatgacgtgctgttttggtggtaaggagggtggggtagaaggggcccttgggactcagtggagtttgagatccttgagtttcatggacacaggtgtttttggccacatcctcacagaatgtcccctgcgtcagggcaggatggggctggcctgtgtcccatcactgccacagtttatcgggtgtgtcgggatcgggcattgttgtctctaaggtctcagttttcttatatttaaaatcagggggctggactaggtgatctttgagatcccttccagctctgacttgtgatgtttctatggcggtggctggggacgggatgggaaagtaggggagccatacagatgcagcagccctgggtttctctgggggcaatcctgtgggggaggggaggggggctgtgctcctgcacacaggtgcgtgggaaccttgttcctgtgtgtgtgtgtgtgtgtgtctgtgtgtgtcgctgtgtgtgtatatgtgtgttctggagaccagaccctgtgagttattaagctttggcgtgcatgcgcatcaccgagggctgttaaaacaccgaccgctgggccccaccccagagtttctgattccgaagtttggctgtcaggcctgagaattcgcatcgagtccaggaccacactttgagagtgactgttgatattgatggctttcacactgtactccctggagtgagatcagaggcggggtggtattctgcataacatttttatgaataagatttcctagactgcaaaaagcctgcatccttccattcttgaagaataccagcccactcccaagcacattctgccaggccttgtcctggtgcttggttctctgtctgtttctctctcccctcttctctctgcacccctgatgtggtgcctggttctctcctgactttggccccatgctgacctttccctaagggctggacttgacctgaacctgccttgacctgcgtgatccaacctgtagttgagagatgaaaacacacttgttacagaatgccattccagactcaagtggatttgtaaaaatgatctgggaggtagagtaagtcattgtgtgactgcgcctcaagaaccttacttggctcccacttgcccccaaggtgtagttgagacttctctctgtggcactcagagctgttcatgttcaggctgcagctcctctttggagtcctgcctctcgttattccccatgggaatcctctgccccagtgagctgatctgctgttcattcctcaaacattctcagcattgttcactctcagtctcgtgatccggccacttcccctgcctggagggcttctggcctccagtttgcttatctgggccctccctgtcactccagtcccacctttgagaggttctttgttgcccagacccatgtttgtggattattttatctttccacttcctggagctcatagtgctagcagctgctgtgtgttaagcactgtattcaggcctggcagtgtatatagtcactcatttaatccgcacagccactgtctgagtggagaactgctctcgtctgacagatgaggaaatggagaccaaaagatgcaagagcttgtctaaggccacagcggtaaataacagtgaggattccagcccaggctgactccagagcccatgttcccatgtttattgcagaagtgtgtgcaagagcaaaacaactggaaacaagctgaaatgttatcaggaggcatttgaatcaagagctgaatcacggcatagtgagatgatgaaatcctgtacagcagtttcagtgaaaaccttgttctctgtgtggtaacatggctatattttgaaaacataatgctggtgaaaaatataataagttgcagagtgacataccatatatacacgttaaacatcacaatgactgatataatacgttgtttatagacagaaagataaaatcgtgggctgaatacaaaccaatttcgtgacagtcttggcctctagggagagagggagagaggaaaagaagggtatgtacagggctcttaactttacctgtaatgtttatattctgtctttttttaaagatcttggcatttgacccaatggcaatgtgtattaattccaggtgatgagtagataaaatattcaatacaagatcctttgttttttctttattataatgaaactttagaagccctaagcgataaaaagattattatacccactagatttatgatttaaaataaaaacaatattaaaatcctcatatttcttggctggggctgccataagaaggtctcacagactgggtggcttaaaaagcatatgtttgttttttatggttccggaggctggaagtccaagatgaaggtgttggcagggttggtttcttctgaggcctccctccatggcttgcagacggtcgccttctcactgtatctttacatggtcttctctgtgtgtgtgtgtgcctgtgtcctaatctcctcttcttataaggacaccagtcattttgaattagggctaccccaatcacctcatttaaacttaattacttctttaaagaccctatctccaaatacagttacattccgaggtactgggggttaggacttcaacaaaggaattttgaggggaacacaaaaatattataacaatcataaaacaaaaaaatgcatacctgatgaaatttaaagcaccatttttagattttctgagtgcagaattctgtggaagttcatcaaggctgattttttttttctcattttattttggtgtgtcttgttgcgaatgcccaaagtgtctgcttagtcggtcatgtaagcaagagagccctgtggaagaagttgcacagtcttaggtggaatagaggtggataaagggaaggacacacgcaagcaagtgcaacatctgagaagggtccacaggacagttctgtgttttaaatttagatctcaggtgtaaataagcaaaacaactcatatataaagtgcatgatttctagctctcttatgaattaattaactaattatttcaacagctaccagtgagcaccacacttgtgtcagtaaccatgttaggcatccctccacccccacacaatgacaacgggctgggaccttcagctctggggatgtggtttagcagtaagaaagaacttcccaaaacaatgggtcacaaaatagggctatggaattgttttctttgggacatgtaaatacataggatccctcccatcccatcattttattatgcaaatcctcaaacatacagagaagttgaaaattttgctgtgaacatccataaaactacgccctagactctgcaattaatatggcactctacttctttatcacatcctctatccatctgtccagccctctatccactccttaacccatcctatttttctgatgcatttcagagtaaattttagatgttggcatgctccctctacatacttcagcatgtatgtcataaaattagacttcgattctttttcactttttgagctaatatttatatttaatgaaatgcgttactcttaagtgtgcattctctgagttttgacagatgcgcacgcctgtgggacccaaacccagtgagagacagaacattaccatcccccagaaagttccccacattcttcccagtcagcatctgccattgcctccccagggggagccactgtttgggagatttttcttttcttttctttttgttatctacttttgagagtagtgttttttgttttttttttttttaattttggtagcttttggagtacaagttgtttttggtttcatgggcgaatttatagtgtgaacttgtagagatttgtacccaatatgtagtttttttttttttaatcccttcctcccttccgtccttccccttctgagtctccaaagtccattatatccctctgtatgtctttgcaacttcatagcttagctcccgtgttggtatttttcttctcttttcttttttacaattttttttttttttttttttttttaataatagaggctggagtctcactttgttgctcaggctggtcttgaactcctggccctaagtgatcctcctgactcagtctcccaaagtgctgggattacaggcatgagccacagtgcccagcctgttttgggctttttcacaatagatgacttttccttcttctacagcttcatagaaatggaatcatataatatctgtttgtcaaaaatgtttgtgagattcatccacattgttacagatatcagtgtttggttcctttttattgctaagtgatattacattgtatgggtaacctgaatttatctgttctcttgtttttggttgtttctagttttggagtattatggataaatctgctatgaacattcttgtacaagcctttttgtgaacgtaggctttcatttctcttgggtcattccccaggagtgaaatttctgggatgtctgataaatttatgtttaactttataagatactgcctgacctttttccgaagtggttgtaacagtttacactctaggactgtttttgattaatctgggttaggagagacacatttatgtgactcatcgaaacaggaccttgtatctttgccttgcagaggaagaaattgaggggaagaagggtggcatcacttgttcaaggtcatccaactggtaggtggcagagctgggatcctgtttgactcaaagccccaggggggttcctgttgtggtgcacagcttcttgctgctttttgcagaggagtgaagcaggcagaaaacagatgactgacttctcaagggcaccttctggggtcctcagcccaaggacatccccctagggtcctctcagagctcccttcttctctgtgacactgtggaagccagggcctggtgggcatttggtgctctttagcagggctgggtcgtttccttggggttctccatccaccccagttgtgctgctcctcccaggggcccaggctgagtctcatgtgcaagggatagatgaatgccactcgaagagggcctggtcccaccagaaaggcaactcccctgggcttgtgtctctctcccacaatggtttagctgcgagtcctgcttgctgagtgctcagatgtgggttccgggaaggccgagaccagtgagtgtccactgtctgcagcagggtactgactgcgtgggtccagcgaccagcccagcctgccagctcagagcctggaggctattgtgggtagggtagacagcgacacaggccttactcattcatgttggtgattctgtgatgtgcaagacacaacgtttctggcctgggaccttacaattcagtggatagaggccatccgttgatatgcaagcaaagaaatcagtacaatcatatcaggagtaagaagttccgtgaaggtactcaacagagtgctctgttatgaggcatgatggggaggtgaggaggctgcctttgtgtaagggtagggcgtctgggctctcggagaatggattgtccagcttcgatctgtcagtgacagacagtcagagcttcatgagaactggagccagaagtttccaggcccagggcgtagccagtgcaacgcctctcaggttggaaggggctggaagtgtgtcgggggctggataggaggccctgggagcagggctgagtagggtgcgctggtgggagtgggaggttggagaggtctgcagggactagatcaagcagggtcatgcaggctgtgggaaggggttagattttagtcctagcaaaataggaagtcccagagggttttccttttaaacaagagatgattcgacttacagctgaagtgatgggtgtaataaatgtgttggagaaagaagcacaaggttgtacagatttctgtgagggggtgcttaatccaggctgggcatgcagagaagctccccagaggaaggggcaactgagctggaactggagggatgagcaggcactagcaacatggcgagggcagaggcgatggagagctagtctagaggagggagcagcgtgaggagggcccctgaagcaatggtgtctttaagaagctgaagaaagttcattctggctggggaagtcgagaggggagagactgtgcaggcccaaggaatatgggcttcttataatgatggctggtgtttggtccagcttatctttgtctttccagtgtttagcatatgccttgctatataaatgcagggctgatgcatgcatcaatcaatgaaggagaatgaatgaatgaaggaagagagtgcagtctggagatgtgtaggctatgggagctttttgaaggtcgagcggggggcgatgagagacaaccttggatcctgagaggggcagatgtgattggactagggtgctgtccatcgtctcctgactgaaggtccaggctgcctggcaggctggcctggcacaggacggtgactgtggacctcctttgccatgagaagaaggcttggtcccacccgagaggcatcgaggtgcatggtggcagaaagggactccagctcaggaatggcacttgctaaaatatatttgtttattcggagatttaattaacatgtttaaatattaaagaggaaacaacgcatgtctagtgggactcaacatttaccaacagttctcacttatttaatgatttgttttcacagccctgagagccatgtttctggctttgttctagggaggccagagggagtagagattctcttggacaaggcagggagggggagcactggatgtcaggggaggaggagcaaggtgtagggaggaagggggcagggaaggaagggagagtaaggaggaccaggaggagagggaggagaggagagcagttttctgaagaggtggacctctccaggcaaaagaaaccaagaccctgcatttggtttttgtggaaggaagagagttttggagtttcaggacagtagggctagcctgcaaattaaggaggcctgtggcaactaggaagtccttgggggagtctctgcagctgggggattagagggtcttgggatttgctctttcgaggatgctaactgtggtttcagtgtgctaactttcgtggggtgccacttctccccaggatgcttaaagagcctgcaggctgtatggcagcagcccattcccttgccttcacagggagggaaggatatggacagataataagacccccagccaccactgcaggtggaactgtgtgaagccagaggtgtttcacaagtgatctgcattataatatctctgcaaatgaagtcctggatactgagagattacactgggggcgggggggttatttattggcaatgtgctctacggttttaattttttctttttgcttattcaggctttagctccagaggaaaatagcctggggtggctccgaaatagattctctctgccccattaacttattcagtgagtttaatggtcccttctcccctcagccttgaagccatcattaagaggcagagatttataaaagcgaagacactgagctttagtcaaactttcgctctgggctggggggagggtctgggtggaggtgccccctcagccctgctgctgtggatacagcccatgagtgggcccaagaccctcaagacggaagctgtaggctgggggatgggttcctgggtgtgtgggggtagtgacatcactccacaaaactctttagggttgaatgatcccagcttctcccagctctcacaaggcaagaatgttatgttgtcactgaaggcctggaggctgagttttctggggtcctcagtaggcctctggggccttttcttggtacatcccactgcccaactcctggctgctcactgcctgctttggttcagtttactgcaaatcagctcctcagaggttgcttcatggagggattaacttgtcagaagccggttcctttccagccaagtgtctagagggccaattgcccaaatgaccaatgagcaaatggccaaaagaaaaacagccacatttaccaaaactttgatttaaggaatataattattgaatcaagccaagttaagccagtctaatccagggctgtccaattcagtgcaatccaattcaatccacttcacttcctccattatttgagcatctgtgctgtgcatagccagatattgcagagggtacagcagaggaataaaccaagtctgggagcagattagacaagtgcatctgttctgtaaaggaagatggatgtgacaagtgaggtggcgatagaagaggatgcagtggggtggggtggggtgggttttaggaaaactttgaggatggtgcctatataggggggtccctggctgtacaggtaggacctggatagggagggaggtgaggcaggacatttcaggcggaaggtgtagcacacagccagagtgcccagtggggtgggtgaagtgcaagatcccccatcacctggaggtagggagcatggaggggccatgagcggccacagatgagctgtgggattcactcggggagggtcttgaatgttgggctgaggcatctgtaccttatccggttagtgactggagtcactgaaagtctaggaagacaatcttaaagaaagttcaaatggctcaaaaaaaatttaagtatctttgttaatggaaaattgaaatagtgaaaagtaggagatagaataagaaatcactcagttccagcaaccaggaaaaaatcccccctactctgatggatttcctttcaatcttacagtaggttgattctatagtaaggtggatactagagtcacaaggcaaaaagtgatctctgaaaactctttaaaccgctcatgagtggacacaagtgtgttcactatgaagaacacaggagtgagatcagctagggtacagcgggttcagcacctctcttacactggtgttgatggatgctcgcattgagtgaaatcgaggcagaaacaccagcctttgaaacctggttatttctcttctcatttttcctgggtgcataaagctaaatttgcatagactcagtgtgtagactaaagaagaccattgcatttgtgtgtgtgtgtgtgtgtgtgtatttacatatacttgggcaattatttttaatctgcgtttcaagaaagagaatctgaaagtgacacagattgaggaagaggagaagcaaatagtggagaaagaagacaggaggcaactacaatagctctggatgggtgatgtgggtggggggcaaggggagcggagaggaaatatatttcaaagcctatacaaaaatgttaaacaatgctgattttcatgtgttgagtgtgagagttggaggtgttaaggtggaataaaatgcccagaacttgggtgagaaggggaacaatgctgcctttagcaggaaatggttagggggagaggtctgtgacatctgtttggaacacgttgagttgatggtggttatgagagatgaatagcatgcaggttagaaatggtctggagcaagacatcctccctctaatcagcagacccatgttggttaagtttatcaacacaagaaaccagcaagaatagcttgttaaagaaggggggtcaagacttggccatgttctgagagcccattctgccatggctaccagccagttttctccatgggcgtcaaccaactggcatgtcttcaggaaatgggctttctcttgtgagagctttattaatattggcttaaaagacattttacctttgtctttatttacagggtggttttgtctgagctttgttaatattggcttaaaagacattttacctttgtctttatttacagggtggttttgtcttttatgtttcctctccccatccccactcttctcaccaggtctgtaggtagaatcgggcctctgtatcccagaacaggtatactgcaagctaataggagaaggcaagaagattggttggtacatgattattaataataatgagaaaaattaaaatgattaaaattaaaattgatggcttttcaaaataactttttactcttctttgaggaaagctggccagatttttttgttccattttacagagaaggcaatgacttttccaagatctacctgcctgttagggggcaaacagggcccttcttgcaatagtcagctttccgcgatcatgatctctgaatccaaaatgagaacatgtgctctgcagaggtgaggatacttgtgggaacaacaggtttccatatatgaactttgagccatcctagaaaattcaggcatcctcttatcctggtggatgaagtacttataatggtgatgatgatgactgacaacaataggaagaagagcgtcacccaaattgggtgctatgtgctgagcacttttcattcagtgactttaatttaatttaatcacagctgaacaaggtaggtgttatgattcccactttttagatgaagaaactgagacaatggaactgaggtcacatggccaaggtcatccagctagcaacactaactagattggagcccagagcacacgctcacacccctacaagttacagatgacagtctatggtctctctggactctttgtccaacctacatctggaggtggtgggaccaccctgtgctacccagttctgtacaatggctgcattgtgacttggttagattttccaagccggaacaaatgttcctgatgtcagtccagtgagaaattctgctccatgttccctgggctacactgatccattcatcttgtataagacaaccatgtggggaagtagataaaatatttgtaccattgattgctttatctcatgtggatggaaggtgggagtgagcaagtgcccatgagcaggtgagggaggctgcacccacctgtgtgcagagagtgaccagggcaggacctcagggatgctggtacccctggggacattgcctgttgcatccagatctaactctgacaagagttaactggcaggctcttctcaggatcccttctggtgacagactgtgttagttgcagaccagggtatcttcttttggatgggagtgacgaaggcatccatcttgaggaggatgtagtccctcctcacatctttgaaggttcatatggaagatttagtaaagtggatggtctttccagtcattgagtcactcaacaagcattgggatgtaacatggagaagcagattggaaagatcctgagtgtaaagatcaggcagatttgatcctagttctcctgctcatgggctctaggatgttggataagtcatgtaacctcttcaagctttagttcctcctggaacctcatcccccagggtggttgttagagttgaataccattatgtatgtaatcagacaggcttgcgtttggctgcaagtaactgaaaactggcttggtggcttaaacatataggggtttatttttctgatgaaaattagacaatgggagattggctggtgttggtccagcactcagctatgtcaagggtggagtctctgccattctcttagcctttctctcatggttgcatggtggctgcagccaatatgtcctggtgaggggcagatagggtcagggaggggtaaggagtgagcacaccagcaaagaacggagctccccagaggtccccccacaacactcccacccttagacttctgcatatggctcaggcttcaaacctggccatcccttgttgccagggaggctgagcagatgaacatgtggctttcaatctctatggcaaggtgaggtgaagggggcagaagctggaggggcttctgggggtgctgccatatctagagagcttgttggcttgcagacctccagttcccctctgttactgcgtgtgaggctttgtggaagttattttgaggatcacagtgatgaccccaatagacaactataatacaagggaagaggtgaagagtactggggtcatgtgctgtgggttttcctggaggagggtctgtttctgcccaggggaatcaggaaggctgtggtgggatctgagtgatgggtcacaactgaccaagaggaagggagttggaaggggcagcaattaccacagctcccagaggctctgagtgcaggtgtagacagatcctttatgcactacagggtagtatgggggcaaggggactgataggatgagactcatgtttcaggaagattgagccataacagccagccatggattggaagtagcagacagccaggatggggagacccagcgggaggtgtggaatctctccagatggagggatgaaaatcagatataggaagagggggtgggagagagaaatggcatggaggtcagagtggcaggatttgagctgagggggcatgcatggattctcagtgctgggatttccagtggggagcccaggagagaggggagtgacgtgcccagagatagaggaagatcagcagggagtggatatgagaaggaaaagcatgattctggtttcacacattgggtttaggtttggcctggaaatccagaggcagatgtctgccagcagttggagtttctgggctggcttgggcataaaaaccaggcctgcaggttagtgaattatgtgtctagaggtgagggctgaagccaaggatgccagtgaacatgaagaagggaggagggccaaggtgagaaccctgtttccatctggatacaggagtaaggagaaaggacccacgggagtgagctagcaaggggaatgcttggtactgctgcgaggggcatgcagcttctagggggagggtagtggtcagcgacctcagtggcccagaactgaggtgggtagagggggagggaggaacgggcagtgagtgttcccctgagggtttggttaccaggtgtgttaatctgctgctgctgccataacgaagtcccacagactgggtgtcttaaacagaagaagtggattcctcaccgttctagaggctggaagtccaacatcaaggagccagcaggactgggttcctctagggcctctctccttggcttgcagatggcggccttcttgctgccccttcacctggtcatccttctgtgtgcacatgtccccggtgtctctcttttcacctgcccacatttcctcttataaggacccagtcacattggattaaggcccatcctaatgacctcattgtatcttaattacctctttaaaggttctatctccaaatacagtcacacaccgaggctctaggtaggggctaggacttcaacaaatgaattttatgttgggggtgaggagtggacagcagtcagctcctaacaccaagggaaagctggtgataggttggtgggaaatgcagctttttaagggaaatgtgggcacaaaggaagagccagtggatgggagagcctgaaggagcaggagagacccgacggggaggatgcagggcatggaggatttgggagagagagaataagaggtgcaaactgaagctgagatttcctggaaggctggggcaccatcgttcatctctgtccacagagcctcactttatgctgggttttggataaataaaagaagagcatcctctatctctgtaaaaggagggaaagtggaaaaggtgaatgtgcagatgcatacataaagtggaaagaagatgagagctcaggtcagatgttctaaatcttctcagtgatacttaacctctctgagcctcagtttgctgctctgtaaaatggggctatcacccctccttcactgggtgactgagaggattaagtaagataatttctgcaaaacacttggcctggtacaatgctaagggctctctacaagttgagtgtgattattgttgttacttttattaataatggaacgggacacaagaccatgtgagtgtgggcccaggggcaggggtgggggtttgatggagatttgtatcagccataggggccgtgcggcccagagatggctcagtgctccccctggtatgtcaggatggagggcagtgggggcctgaggacaaggaggagggacttttgaggctggacttccctggcctctggaataatttgtgtctgaaatttcagaagccagactgttctctaggaagtgagtgttggaactggagacccacccccattgtgggtcatctcactgcccttcagtgcctggccttccccggcatctcagggccaccttgtggactgctcgtggcctgtttcttatccactcacaccatccagtcggcacttcctgggatctaccctgagggatgctctggtggctgcaacctctggggtggaggagagagcatgtgctgagggcattggagggcagggatgaagggagaggaacccatggaaggggtctgcagggggcaaccggcaggtgctgccctgggcttaggactcttggtcccagagctaaggacttagagacggtctggctcactccctgcattctacagatgaggaaactgaggcctgaaaggaagaggacttgcctggtgttgcacagtggggacatcacagagtgaagactcctaccatgcctttgacttcacatccagtgttctctcgacttccagactgcttcctgggatcgcccttgtcttgtcacctcggccctttagaagggccatctctccagggtctggggtctgagcagatcagggccagaggcagcagcaggctgtgcatgtctaggtagcgggtgactgctgactgcagcctatcggacccccaggaagggatctgtgccttgttgttctggcccttccttcaatctcctcccatccctcctcctgcctgccgtgaggtgtggtgtacggggctgtcggctccctgagtttctggagagggttttggatctggtctgcatggatctggttgggaaacatcagcactgtcagaagaggggaagtgggctgtgcctggcttgtactgataattgtgaccctgctttgtgaatcggaactgtggatgacttaaaacagagatatcaagagagaagcttcccacgccctgcagccctgccctgtcccccatcttgtctctcttcttcatctcctggactcttcatcctcccacttcattcatctgcagcttgctttgggagccttctccactctgaacagcatccaggggtccctcctgcagaaaacagagggtttttggggtttgcagaaaggaggtgggatgggtggcttctgcagctctgactggctggtctcttttaggatcagggtagtacagagggtatagcccctgctcacctccacccagcagagaacccatacctgcttaagcccagtatttgtgcagaaatgtcttctctcactcaagcaaaaccccgacctgcattggaaagcaaacccagcagcacaggggtagagatccactggggtgtcttgacacgtcccttttagtttcatcttgggcttcttcccctttcattattcctgccatcaccctctggcccaggggtacactccgctacccaccacgctgtgagaaacatcatctttcccgcaacctcttggtagtggctggcatttaaaagaagagaacttcactaactactaagggaaaataaagtggagatcattataggaaaataaaaaggcaaacaggatcaaaatagcccactttgcaaggcaagggactgcagtcctgcactagtgacaccctgctccccaggggttggtttgattctccagctccagtgccaagagtgagggccttgtgcacacctctgccactctgcctgcctccatgtgccaggataatttatgtagctgcctccctaacaagacagggacacctcaaggtcagcagcaggctgtgccttatcaaccctaccttcccagagtcgcagcactcctggtaggtacctgggcagtgcgtttctgctgtagaagcagtgtcacaggccagataacagcatgggtgagaataatgacagtcgtgatagaacctgatgactgaagtcttaataggttccaggccctgctatggactttatagagatgatctcaggaataacaatgcttatctgaaattcaaattaatactgtcattagcttcattggacagaagaggaaactgaggcttagtggttcataatgtacccgaggtcccctcagctgggaggtgaaggagagagtatttagacccagcttgttgaggccccggaatgcagactgtgtgggacttgtctgcacctgctgggcatgttcttctcatgctgggaaatagcgttctcacgacttgctctccaggcctcagactcggcaggccaactgttcagcctgtcctagtctctgcctttcagatctaggttctgagttctggtgcctggtgcagggctggcccctcaccttgcagggagcatcctgatctgaacttggggcctcatctttctcagccccatgctcacaaaggggccttctgacactgtatcatccttaggacgagaggcccaggcctcttgtcttacattatctgcaccagctctgagatgcagaatctgagatcacaccagatcagacaataggtctccggccccgggccttcctagctatgtgggtgctaccttgagtgttgcctggaggccaactctgtgtcctgttaactctgcaactccctctggtcaacagaatgaatgccatctcactgccctcatcttgctcctaataacacctcccatgcctggttgtcccttgtcactttgttcttctgcctttggagcactgcctcggtttctagcctctaccctgggccgaactttctaagtcttctgctactaccttgtgaataacaatcctggccagccagcactgtgcgaagggtttttaatgtgcagtagcccactgaatcctcctgtggcccaaggaggtagacggtattattatgcccattacatatataaggaaacacagaggaagaccccaaaaggttgagtactttgtccaagaccatggagcgatgaagtggtggcgttgcattggacagggctctctgacatgtgaatgctgcctccttacctagggctgccccaggcctgcttctggcccctgggcatacccaggccctgctccgcagtctctggcccttgcaaaactccccacaagcccacccttgttgcccacggcctttgccttcttgtccctggtgcagtcttcgcctgccagctgctccttctgcctctgagcgtgtgggcagagaggggctctgaggaggaagggagcaatgaggcagcagggggcacagctgtgaccagcggccagccccctcctccagcactcacgcctggtgacacaggccactgcgtcctcccgggtgacctggtgtgatgctttgccctggccagctggtcaaggacattccactcggctgatttggaagcagtcactgtccgccctgggggccgtgtgctgggggtgttccagctggagtggctgacatctgccttctgcccaatcccacccgcctcccgagcccgcagctctggctggagggagcagggaggcaagcaccttttctcccctgctgcccaccctcctgccagccccatcgccccatctccttcctctccctcctctccccacttcttggtttgagcttggagggctctcagcccagtgtgaggcagtccagaaccccaaaagaatcctgcgggttcctcagggacctcttggtctcacttcgccgctgcctgactgcgggatgttcagtgagtcattgagcctccctgggcctcggtttcttaatctgctgttaataatggtacttgcctcctagggtgattgtgagaattccaagtgcctggcaccccacacttcagaagtgggcactctggtcacagattatggccatgacctccaggaagcagtcaatcacctcaaagtgccaggaaagtggcagttttgtctactttcacctcacaactgggcaacctaaacttcttgggcaagtctttgagctctatgtgcctcagtttccccacctatgaatggaaatcacaggctgtttcacaagattaatgttctgcgttctgtgtgaaatgttctagaaatgtgctccataaactgaaatggatgattaaaatgagggatgatatatctttaaaaaatatgattgttgtattattgaaaggcagcttcagggttaggaacgtaaactgtggatcctgcctgaatttgaacactagagctgcttttcttgccagccgtgtgaccttggctaagccattgaacctgtctcagtttcctgttctgtaaaatgggaataataacagtacctgctgcatagccttgttgtgaggttttagtgtgggtgatgtgccagattcagaactaagctggcataagagtcatatataggtgcatgtatgtgttacagctgggcactgggatctgttcctatgcccgtgtcacagagaatctctgagttctgacccacgtgcattccagctagttggcaaacagtccctctgtactgcctcacccaacatgggctgcaaagtctgctttctagctcatgctttgaggtatgacaggcctttctagctcatgctttgaggtatgctttgaggtatgacaggtacgtggccaagagattccagttgcatgtaaggtgtgcaagaagccctggttctggcagttatctctgcagtgccgcgtaagctgtattgataaattaatcttatattgttgggaccaaacaatcctgtaatttttctattgtgcagcctaatcggtctcaacagctgtgtcattagtttatgtttgttgtaatctagtcaggcccttgtgagccattgaacaagcccccctcccacctccccattcacccgtcactacgggactggcctcagtgctcttttccctggcctgcactctctgttaaggggtggcaaattctttgttttattttatttcatttttattatttaattttcaacattttatttttttaaatagagatgaggttccaccatgttgcccaggctggtctcaaactcctgggctcaagggatccacctgcctcagcctcccaggtgttgggattacaggcgtgagccaccgcacctgacggtaaactccttgttgaaaaagtaagcattgcatcaggatcaggttatgtggctctgcccttggtattcactagctatttactttggtaacatggttaaaattgctgttatttttctcatctttattgatgtttttttcttatgaatttgtaatgacatcagcaaatacctaaggtgaaatattaagtgaagaaaagctaggattcaagttgtccatccatcatcatctcatcctctaagaatgaagacgggaggaaatgctttcaggctgaagatggttacctctgggagccgtaattgccagtgactttacttttctttatatgttttcagtttttccagactttccacaatacgtctgtattactttataaccaggaaaagagtaattgaaattaatccgcatgaagtccaccagcaatagagtttctttctttctaaaatgaaagcattggactagattcccaaccctggctgtgtttcagaatccccaggagagtttgttaaaaatgcagagaactgagccccattccaggaattctgagcctgtactctggggttaagcccaagaatcagcatttttgagacgtatcccctggaggttcagaggcatccagggtttagatctctggacgggttgatctcttgggacctttctgccatgatcacttcctatggatgtgtcctatttcaagtggcttgactgtggggtgggaatggggagtcctgtggccagcattcctctggcttgagggacagatcttttggacgttcccgctctcgctgggaagaagctggctgcaggtgtttgtggccatgtgcaggaaatggctggcttgaaagctgtgtgggctcctgtgactgcctggaaaggggccttcctcttgccaacatttcccaagagccttccagggctgggcctcttctcatctctgacccatttcattctcaccaactcacacagtggaccttgctctcactatttttcagatccgaggcttccaaatttaagtgacttgctggcgtcacacagctactgagtggcagagcctagatttgaactcccatctgtacctgcaagcccatggcgttttctctccagcaggccccattgggggctgacccacaggtctctgtcttggtggcctttgaggtttcggtcattcttctgagtaggagaggctaggattttcctgtgggccatcacccctctccgtgcctacagtaggacccctgccatgggactccacaaccccaagaaatgcatgagcggttgatttgcttgggggagctttttcagggttcctacgtgtggctcaaagccatggtggtcattgtcatccctgctactggcattctttttcatttatttatttcatttattttattttatcttattatattttagtctgctgattatgccttcttttaaacccaagctgattaaattgtagtctgatttacttggggattttctctgggcatttgaagctctctctcctggcagtcgatagctgcatctttggctgggctagcagaagcaagagaggagggggtgtgggcatttctgggtttggatgcaagttctccagtgagagctgtgtgaccttgggcaagccattttgcagacctttgcttcaccatgtgtgcagtggggataatgctgcccatctcagaggggtgcagagagcatgggctgagagatgatgtaatgcactcagtgcagggcctggcactcagaagtgctcagtgcgtgttaggcatcaccatcaagattcttccagtcttgattttgacctccaccacccctggaagcctggacaagtcacccacttcaggagcttcagttcccaccagaatgtactgttttggaaatggaagtgctggttcacagctgggctagtagaagtttgggtttagtcgacttcatccagggagaatgactgtttcttccagaatttagctcagtgtgagggaaacaggattggttctgtctcctaaggttttgcttggttccattgccaataggcattgaggccaggaggccagccttctgccccaagggtccagccctgcacagtgagggactctgggatgcctcatcagttgcagcattccagctgctggctgggacttctcctcttggcccccgtctgtgggtttcagggggctgtcagtttcctagtagacagcccagttgtacccaaacagccacacagctggctggagaggattaaacttaatttgctgcaggtcaaaaggattttaggcccctcctgtcttttttcattgattattttgctttgatattgaagggggaagttggactctgctaatgggcttctctctctgcccaggcgggtgccatcctgcacatgtaggtctgcctcaggccttccacagcctttccttcatgcatgcagattgttgtttacatatttcccaccagtctgtggccaagaggtcgtctcctgtcattgttgctagggctgttgctatggcatctgtcatccaggctgtgttgtgagagaccacgtgggtgatgccatgccccctccagtacagacggtccttggcactggaatggaggaaggccttaaagggaatactggctgggtttacaaacaggtggatttggatgagaatagagaactcttagggcaagggattcctgagcactctaaagctccacctctcacaggggttaatgcggcatcagggcctcctgtgaccggagcagatgcaggtgctgatcctggtgatgacatcattgagctttcgggcagctcaggaaatggtgcagggcacagaagcaacagagtcacttgtgcctagggataatgcttcccaaggtccccaggccctgcagtcagactgtgagcccgagagtggtgcacagggctccagctgacagcatggtggttaaaactcagaatcatcacgtcctgtgattgaacattgagtgccttctgtgccccagcccttagcaagcattgtcttgaatccccaggacagggctagttgatgagcattattatcccattttacagaggaggaaatgtaagctcagagagatccagtaagctgtgctgggtcacagtaagctgtgctggatcacagagctggtaagtggcagaggcaaggttgacatcccaggctgcctggccccatagcctgggtcttcaccagcaaccgtagctgcgtggagaagtcttgtttatttctctttaggaggttttctatggaggctgcatagaaatgtccatcagaggcctcaacatagtggtcttgtttatagcaaaggcagatgctcccatttcacagacgagagaatctgtgacttgcccagggacgtagtcaggctagactagaaatggtttcttgaagcacacctgcattcaactcgggggaacagagatgttctgggcccccacagtgggtctttagggagggttgagattgctgttgtccaggtgttcgtccaagacagcgacccccagaggcggcctggagaatgggcacaagagccttaaaaaattgtgctaaaacggtgaaaccccgtctctattaaaaatacaaaaaaaattaaccggacgcggtggcgggcgcctgtagtcccagctactcgggaggctgaggcaggagaatggcgtgaacccgggaggcggagcttgcagtgagccaagatagtgtcattgcattccagcctgggcgaccgagcgagactccgcctcaaaaaaaaaaaaaaaaattgtgctacaaaacacataataaaatttaccattctaaccatttttaagtgtacagctcagcaacgttaagcacatccacattgctgtgtaactggtctcccaaactcttttcatcttgcaaaactgaaactctatgcgattaaacaacaactcttcctcatttccccattcccccctcccctggcaaccaccactttctgtctctagaaatctggctgttctaggtacctcatgtaagtggaatcggacagcgtttgtatttttgtgactggcttgtttcacttagcataatgtcctcaaggttcatctctactgtagagtttgtcagaattttcttcctttctaaggctggatagtagtccatggtgtgtatttaccacattttgttatccattcatctgcgatggatacacgggttactttaaccgtttgattattgtgaacagggctgctgagaacatgggtataccgttagttatctctttgagacctttaatctttttgggcatttacccagaagtagagttgttggactacatggcaattctttgtttaactggggaactaccacactgttttccttagtggttgtaccattttacattaccaccagcagcctaatgtctccacatcctcaccaactcttgttattttttgttttttttagtgtccaccctaatggttatgaggtggcatctcatggttttgatgtgcatttccgtaatgattagtgatgtcaagtatgtcttcatgtgcttatcggccataagagtcatttttttgaagctctgttaacgtcaaacttcaaaccactgagttcagttcagtccctggtactttggggtcaccaccaaatatagttcttatcctaatgggacttgcagattaagacaagtagggcctgaggctattccacagtcaactgtagcaaggaagggtgagatcagttcctcaagagaggggtggataataagttctggagctcttgccatgggaggaggacatgcatttgtgatgatgctgggctcccctaagaggagtgataaccattccccaggcagtcaccatcaccatcttgacccaccacaggggatgtgcctcatggaggcctgttctaggaaggatggctgggtggcaggaggaagttccagctgctgcacttggatccagagacagctctcccactggccattcctgtgtgccctttgccaaaagggatggtctcactgctaatttggggtcgtgcagaaccgcctccctgccatgaccagcacgtggctgggctggtcagccccagggagagctatttgagtacattttattctgtagctaagtttccctccttctcaagctccaggcccacaggggtgagctctttctgagccaggagaagtacctagggctgctgtgtagtttttcagtacccaggatggccaggatgctgagcctccggggcaagatattccatctgatttcgggagacagtccttcctaatgcagaccaaacttgatatcctagtggctgtccctctgaggtcagtgatcaactgctcctgtcctccctgccccagtgagctacaacataacaactcgctctcaccccttatttaatcctggcttaaatgggagcactattgagtgggggcactaagatcccctagccatgaccttgggccagacactgtactgggtgctttgtgaacatctttttgttcaagtcttatgacaacctaatgaatgtgagaattgctttctccaattataatgggacagcataggatagagtttaaaagcagagaccctctcaaatcaagctgcctgggttcaaatttcagaattgtttttttccagggagaacctggggagcctagatccagggaaagaacagcacagagagttataaatctttgcattcatgtttgcatttttcaatttcatattctttgcatatgaaacttcctgtggttccatattttaaaagtatatatagatgttaccctggtactgctttgcccagtgtcaattctctccctcaagagaatggacttgcaattctctcaccagaggtgaccaattttgcatttaatttgcagtttgcccctctttgttatgcaattgtgttgctagcattagaccctctatttctggatctctcattctagaattctttgggcctcttcccccagctttcctcccagccccagcctggctccgctgagctgcctgttgatgcttttgatttctctctcagtggctccctcctggcatcgcaggacacagtgtctagcacggaacgtttcaggggagccacggggagctctgcgtcaacggagatgtaacgctggaatgaatgcctacacgcagagtgaatatctgcacgagggagacagttattggggccaggtggggcagtggggggccgtgtttgccctggagctgggcatgctgcttaggtccatcccgggtgacagctgctttccttctccaacccccaagcgtgatgctccgtttgaactgggatttgtcaaggaagccgtgaacaaaccgggatgtttttcctctgatgaattgccattgccaaattttggagttacttcctgggcctaaatgctagacggcaaacccacagtgcttatggtgtgccagacacatagggtaggaggtgagggaacccagatacctttctctgaccaagaagggctatgggcctataggggctttgagcaaatcactgaatcttcctggggctgtcaacttcctcatgtgggaggaaaccgggcagaggagtggggagcagggcaaggcccagaaagtcatgagttccccatccctttgctgaacacctgtcacctgccagccactgctctaggcactggggcatgaagatgagccccgacagccctgcacttcaggggctcacctcctagtggaggggcagatgtgtgcccagccggttatgggacaaaatggtaaattcagacaaagctgggctcgtatgggaaggcgttccagagaggttgcatcttgcttgggaaataggaagagtgttcatttgggggcacatttttttttccttattctctctgttttttttttttttctgctttattttttcctggctcaaatggtcctagccctagtgacctccccttcaagaagcagtacagcccagtggctgttccaggttcagtagtgtccttgtaaagctcatgtctactctgcagctcagaatgtggctgtgttggaaatagggtctttgcagacataattccttaagatgaggttatatagcattaagaggggccctaaacccagtgactggtgttcttataagaattcgacatgtggacccagacacacgcagagggaggaaggccttgtgaagatggagtagagattggagtgatgcagctatgagccaaggaatgttaaggattgatagtaacccctggaaactaggaagaggcaagagaggattctcttctacagccattcgagggagcatggccctgctgacaccttgatttctgacttccagcctccaggactgtgagacaatttcatttgttttaagccacacagtttgtgatactttgttatgggagccccgggaaactctacagtggctaagcacgtagatcctggcatacggcctcatttcttttgtttttttttcttttttgagacagagtctcattctgtctcccaggttggagtgcagtggcatgatcttggcttgctgcaacctccacctcccaggttcaagcagttatcctgcctcagcctcctgagtagctgggactacagacatgtgccaccacgcctggctaattttgtatttttagtagagacggggtttcacaatgtttgtcaggctggtctcgaactcctgacctcaggtgatccacccgccttatcctcccaaagtgctgggattacaggtgtgagccactgcacttggccgcctcgtttcaaatcttacttaagctgtgtgaccttaggtaagtgacttgactcctctgtgcctcggtttcttctttgtaaaatggtgatagtattagcatttacctcgcaggactgtgtgagggccgtaataagttaatgaaggcagagcatgtaaaatagtgcccagcacatagaaaacactgcgtgtttgtgattattatttgaagtccatctacactcccgcttctgaaccacagagctctcctcgtaccccagagtgaggccgagctgccttgtctgtctgtctgtctgtctgtctgggccttagtctccactgttcctagagaggggctgtgggcacaccctcacagcatctcaagtggacacgtgtgggcagcttgtccccctgttcctctttcattgtccttgtcccgcctttattttattcaggctgcaaggatagaaagtgggagaacccagacacctttaaaagtagagtttcctccagtggagaagagctgtgaacctaacagctggggggctttgagcaagttactcaatcctggtgggcctctgtttcctcatgtgtgaaacgggaatgatggctcaccccaacatcagagggctgcctaaggatgacaggaagtgagaccatgactccagggagcagctgtcaataaatgttccatgcaagaaaatccacaccagaaagacatttgtgctagtctcagtcaggcatagaaagaagcacatttttactatggcttaaacctcacacatacggggccattctgcatgggctgttggcgtcaggtgcccaggcgatgggaccccacagccctgcagtgtctcagcgtgggcatcggtgcagtgaccagctttcctggggctgtttctgactcagtatagagtgaggatggagttggactccactcagtgtgggggccctgacgtttccccttcaggcatgggtcttctttggatgtctgatggatttttgctctgccaatggcagccacagagtgggacatactgctggccatggggccctgggatgtgtgtgtgtgtgtgtgtgtgtgtgtgtgtgtgatgcagcagccaaaacagcttccatgaagcatctaccaggttggagaggtaggaggagctgggagaagggagggtcagaggtcagccaagtgcaagtctcagttactgtatttttgggtaggaacgaggtccatcaacagagaagtgtcttgtgaacatccacagctaaatggcagctttaccctttacacaccttgcctcatatgtaagctaagggccatcactttgaccaccagcataaaatgtctgcactatgggcacgtgttaaagaattcagagacatgctgaagaaatgaactgttagagactttttattttatttttattttttgagatggagtctcactctgtcacccaggctggagtgcagtggcgcgatctcggctcactgcaagctccgcctcccaggttcactccattctcctgcctcagcctcccaagtagctgggactacaggcgcctgccaccatggccagctaattttttttgtatttttaatagagacggggtttcaccgtgttagccaggatggtgtcgatctcctgacctcgtgatgtgcccacctcggcctcccaaagtgctgggattacaggtgtgagccaccgtgcccggcctgttagagacttttaatggatgcttccacctttatttctttggattcttcacatttgattcatgtaataaattgggtatttagaaagcaatgtatctgggctgtatttgctttattctacaaaattgggtttattgaattacagtttaaatgtgttcatgagccatatagagttgattagaaaagaaaaaacaaaaccactcatttgaagaacatttctgtctcttgtagaaatataagaacatgtcctctgcaatgtcacacacaatcttttatagaaggatctatgctacaggttcttttctggagctagtgtcagggaaaacatgtttatctctacagctgacttgtagtgacttgatttgtttcccttttcaccttagctgccaagaaacctgtggccacattcagtgcctgattgtgagaattagttcaccttggactcctgttaacacatactcctttgttcccttttaataagtctattttgcttacattcctaattatgctattttatattacatcttctctcaaatcctttaaaaatggacaattcttctgggtgtatacccaaaataattgaaagtagatatttcaacaaaaaacataaacatgaatggctgtagtggcactatttaaaatagccaaaaggtggaaacactccaaaatgtccatcatctgatgaatgaataaacatgtggtctatctctataacggcctattattcagccataaaagagtgacattttgatacatgctacaacatggatgaacctaacctcaaaaatgtgttaagtgaaataagccagatacaaatgcatgtgcatattttatgattccatttatatcaaatgtccagaattgataaatccatagttgccagggactggggaaagggaagaaaggggagtgtgactgctcaatagatacaggatattttttggggggtgatgacaatgctttggcactaaatagaagtgatgtttgcatgacattgtgagtgtattaaatgccactaaattatacatgttaagatggctaattttatgttatgtaaatttgccctcaattaaaacaatagtgcattaatttttttaatgagtggagtatataaatgccacttgaatgaaaatggtgtgctgggctctcagtggaacatctcactgctctgggtcacaggcagggtgtttccctccctgctcactgctctgtttgtctctcccaaagctgccttccatccaaggtggcagctgtcccaggagcccgctctctgatggaagttgacgcagaagttatgctctttggttagctttttaggacgagttttcatgatccatttacaaataaatcagaagaactcagtgatatgagctgtatgagagaaggcttctgctttctctaaagactctgtaaacttagaggaatttctaaataaaaccaggggcaagttgctccaggtgttcgctctctcctgcccttggggaagacccagcagcatcatcttcacaggcaccacctgggagagttgttcctgcatctgagctttccctctggccagtttgttcagttccaaaccatcatggtgcaaaggcaagaaaccagttgaggaattgcagaggaacaactgcttgagatacaggacattctgtagcattcctttatttctttgaaaacctgaggctagggcttttttgggtttcattttaagaatttcttccatcttcaggcttccgcgaggaagatagatcaggtcattgctctctgttttggaatcgggctgctcttcgaattgcttctctcctggtgcttccaggaggccagcacagttagaggggtctgaggctgcctccctttgagaggccctccctattcaagaaaaacatttcttcctaggtgtgggctcccttcattccctctttcttagctttttcttggggcagtgcttcataaacacttgtacatcattgcacacagagaaattgataatatttgttatttgtgtagcaccatgaggacacatagaagagggtatttacagctggatgtgacctgccgggtggcctccccagatcctatgtggacagtgtctgtactgcattggctggcaagatagagtttgaaggtagggaaggggatgagggatatgtttagcctgcttttgccagaagcccagaatgagtctgtcatttacctgtcagtgcccagatccattccctgcccttcaggcctgacccctggaaattacatctcccaggaccctttgccaactggctgggggctgggtttggccaatggaaggcactgtttgagtctgtggtcaggaacagagagggcaagctccctgcctcactctctgggtagtggtctttgcatctttagcaatggttgtgtttcttagtatttgcagcttctgctgggcagtccctgctgttcctggctcctgccagacggctctgaccctgggcttcacagcaccacttcctccttttatcccttcagcctggggtctttctgctgttgcttatctctgtgttgccttgtggctacctgtttggctttttagcaactccaagatgtcacccgtttccccattaaatttcctctctcaagtataggatgtgaattccgttttcctgactggtctctgactgatagggcatcctagccactcccatgtggtcttccaaatagcaccagctggtaacagaacacacattggattaaccttgttctttgtgcatacaccttccttatcaacccatggcggcagtaggcagctgcctagaatttaggaccccgacagctggccaaacatcatctccccatgaccaataatggggaagaacagaggtttggggcagctgcttctcttgtctgtctagaaaactcctatgcatccattaaggtgcatatatcactacctcttcgtcactgtcttctttttcctctcatttcctctatcttggatcagttgtttcttcatctgtattcccaaaccagtttatagaacttatgcctaatagtagtttttccattataattacacatagatttatttcccttattagtcttcaagtttgctgtgggcagtacctggtcccactcaactctgtatgtccaatgcctcactcagggcacgatgcttggcacattgcaggcaatgacatcgttttgttgaattcgttggccctctaacttgattgcacactaggatcccctaaggaacctttaaaaaatactcagactctactgcagaccaatgaaattgcaatctctgagggtgggctccaggcattggcattttcaaaaggttccctaggtgattttgatgtgcagccagcactgggaaccattggtttatttgactgcttcagcttaccacttgctgtttattaatgagtcctgccatcaaacccagctcttcctgcagtttaattcaacgtagcaaatcactgtgagtgcctactctgtggccaggcattgtgcaggcacactcttgctactcaaagtgtgttctatggactagcagcctcagccatcctgggagcttgttaaaaatgcagaatctcagaccccgcctcattctgacctatgagtcagaatttgcattttaacaacatgcccaggtggtttgcatgcactttatagcctgagacacagtgatgtagcatcatgcaaatgtcaaattgctttctcactgtgaatcttatttcctttgtgtccactctattttgattccctttagaggggtatcattttatatccctttctccagctaaaatgggacatccaaagggggtggagaccaagcaggagtcagatgagatgaaggatccccttgagtgtgggagggatgtgggagggaagaaatggactttgagagatggaagccttcctgggcacacagagtgccagtgtttgggaggccttggggatgggctgtttggaagggatgtctcctgtttctgacattgccacttccttggttatgatccaggcatgctggagggatgttgtggccatagtggctagaggactgcaacagatcccattgcagggagtggggtgacatcgatgcaaaccaagtagccttacttgcctcatgcctttgggatccacacaccgtaggaagtttctgcaggctggcctcccagaatccacaaggttacctgttgttcaagttaaaatggaatatgatgacttgtgtccacaggagcagtggcttttaaaggcagccaggaaggggctgagaatctttgcacatctgattgcatctctgccatctcccatgagctgagcacatctggccctggtctgttgaggctgtgtttgagggtgatgctgatgatagctccgggaagccaggaggggccttggcttatctggggaaaatagccttatctggggacctgcttcttttgcctgcagcagaggcctctgccatgtactgtcgcatggttggtactaaacctttgagaagacaaagaagaggcaggatatccttctccagagaaaaaagctcttgtccccctaatatactgctttgccacctgagtctctgtgactggatgaggccacagtgatagcacataacctgcttcaacaggacagctgtgtgtatttcatcttgaactcttcagatagatttaacagaagcttttggaggaattgggattgtgtttgagaaacgatgtagtaagggtgtgtttgggctctgggcaggaagtcagaaggtgttggggggaaagagtgacatctgtgggtagctcagttgtcctgactgcctcagcactgaagacagttccaccacccagctcatgggacaactatccccgcagtgccatcctggaggcaggtgcctggggactcgctggaggcaggtaatataatagtcccagcaatcaccttctcatgaaaccagcctgttagggtcaagcaacctgacaaataccattgagctcctggcccgagggctggggatgcagccaggaataaaacaggccctgatggacccacaatgtcggggcggagctagacgctaagccagtgactccgagtttgactgtgaattccctgaaggaggaacagaaggttctgggtaatgtagacctggggcgctgaccaagcctgggcctgggggtccctgaggaagcacatttcccctgagacttgaaggagttgaccaggggcaatggtgtgtctggggacagtctcagggagaagcaccagcagacactaacaaaggccctgcgtggggcctccgatgcagagacagatggctgtggctgcagggctatggccgaggtgggagcagggaaaggagctgtgagccaggaaagacccggccccgcccgcctggccactgtaaggagtgtgggtttctcctcagaaccaggactctttgaggtttctggagaggttttttttttttttttttttttcgagacggagtcttgctctgtcgcccaggccggagtgcagtggcgcaatctcggctcactgcaagctccgcctcccgggttcgcgccattctcctgcctcagcctcctgagtagctgggactacaggcgcccgccaccgcgcccggctaattttttgtatttttagtagagacggggtttcaccgtgttagccaggatggtctccatctcctgacctcgtgatccgcccgcctcggccttccaaagtgctgggattacaggcgtgagccaccgcgcccggcctgtttttttgtttgttttttggtttttttttttgagatggagtctcgctgtcgcccaggctggagtgcagtggcgcgatctcggctcactgcaggctccgccccccggggttcgcgctattctcctgcctcagcctcttgagtagctgggactacaggtgcccgccacctcgcccggctaattttttttttttgtatttttagtagagacggggtttcaccgtgttagccaggatggtctccatctcctgacctcgtgatccgcccgcctcggcctcccaaagtgctgggatgacaggcgtgagccaccgcgcccggcctctggagagttttaataagtgtcttccaaggcatctctagctgctgtggggaatggattagaaaaggcggctgagcagatcccggaagatgaggtcggcagctgttgcaactggacccctcttcattaagctgtccacattcataaggcacactccaggtctgcaggagggagcatgagggattcaggggacgcccttgtcccctgtacacacctaggggccggttcgactacagtaggtaggtcagggttatgggagactctgttcagcctgtgtgccttcccatccccaaagtccttaggagccttctcttgtagtcaggcccgccattttatttattcagggcctggagaacgagtaggggccaaaccggggtgagagggctgaccctggagtcaccgttttgggggcttaggatagcccttgttcagaagcgggctgtgtgcagttgggttacctttcagtgctcaggaaatagagggctgtggctggctggcttcctgtatccctaggatgatataccagagctcatgtctgtagaagtttgtagcctcctaggaagagatctgtggcagatcatgtaataagtgtgatttcacgtaagcatcgctgccatgctgggctcttggacctctgtgggaccttggggagatgcttgcaggagaggcctcaaaggcctggctggtgagatgggagggtctgagagccgaggcccacgtaggccagtctgggcggtggacacattctggcttgcggtttccccatgctctcttgaaccagggaagtctgtcatcccttgtgtttctcaccccacacggacactaaggcatcaaggctccagctgaaatgcattttaaaccctgaatccagatccctcgtcttcccaccatatacagaaccacatgctaagcttagcagcagggggagaaaatcactttttatgaacgtcactgtcagccctggattgttttcttctttctctccaatttctcagcactcctgagaatgctgattttcctggtaggaagggcaggactgatgtgggatattgcccagactgtaacaagaatctcagaaacgcatcatctttcccatcatattcctttccttttccctcacctcctgtcaaagtggtttgatccaactgagtttgatccaatgggagaggggcttgtacctcaccactcaggtagccctgctctgctgagaggtgacacctgatgaatgtgcctgagccagagactgtgcccagcaggtggcacgcccccagtgaatatttgtccagtgactgcagcctcgcttcccttcaccagcaggtctggatgtatggaatgagagtctgtggcttgggcgggctcccattctcacacctttatgtaactgattagttcatccagaaagaatttttaacacctcctagggtgcaagcagggtgcaaaggaaagggcctttctgaggggagaaaagatacacccacaaaaactctgatcccaaaacagactgtgataaggctggaaggagaacctggccaaggatcagggcatcaaaggaagagtttgtagagtgagcagcattagaaatggctgattgtaggagtagaagtgatcaaaatctggcttccctacatttctataatgtgttatcgttaattgtgatttttgttatagacagtggcttgttgaatcatctcaagaactctgtgaaataggcaagacttttttttaatttttcaagttagaaggtaataggggagagagtatgccagaaggagagaaatcccaagactggcgagagcaggtgtctgaaaggcattagattgttgggattaagagcaactgctgcggaatccaatggaggagagagtttgtatctggacttcacttaaaaaattacctttgcttgactaacacaagaacagaaaaccagacaccacatgttctcactcataagtgggagttgaacaatgagaacacacggacacaaggagaggaacatcacacactggggcctgttggcaggtggggagaaaggggagggagagcgttaggacaaatacctaatgcatgtgaggcttaaaatgtagatgatgggttgataggtgcagcaaaccaccatggcatatgtatacccgtgtaacaaacctgcacattctgcacatgtatccctgaacttaaagtaacatttaaaaaaattatctttgcttttttttaaaaaaattatttttattgatacataatagacatacatattttggggtacatgtgataatctaatacattcgtataatgtgtaaagatcaaatcagggttattgggatagccatcaccttaaatatttatcttttctttattctaggaacatttgaattactttcttctcgctatttggaaatgtacaatagattaatgtgaactatagtcaccctactgatctattgaacattaggtcttatttcttccatctaactgtatatccatacccaataatcaacctcttttagccgtgtgaggtttgagaaggtcgctcaacctcttggtgcctttcatttataaacaagaatgataaaacctgttcgttagggtggttatgggattgaaatgagattaggggggtaaatgcagagactgacacacagtaaaagctcaaacagtgcaactctttattcttttaagtggattattggggtctgagtcatgcggtaggagacagagctggaaagacacacatgggttcccatgtgtagcagctggtagacaaaaaggtgtcttagtttgggaatccctagaagcagatcctgagagaaatattcaagggcaagtgatttatgtgggaagtaatctcaggacttctaggtaggggaatggggaactgagatgggaagtcaggaagagtgtgtaccgagctagcaatcactgtgggaaactggatctgggatatttgtccgccatcattgctaggagggctgctcctggggtattaagccctgcagacacttggcccactccagagaaagctctcaggaagagagaagcaggtgctggccactgggagccagctagcatcaaaaagtgggaaggtctgagggacatcagtgggacacacagagtgtttgcttggcaagatttgcagtgtctcatccagcccctgcccaaccagattctcctgctggccagtggcattttacttcctagggaatcagcaatgctagttttccttctttatcttctggtctttggtcttgttagttctgggatctcacgtttgtgggaaacaagactcatgggtcacactcagcctttggacacacaggtgtggatgctctccttggcaacatccttctctccaggacagcactctgtgcagctgcacaggtcatggtgaggagatgggcttgaatggaaacttgcaggcagcctctgaggaatcctaggacaggaacaggtctggggcccaactggccacaccctgaagatggacatgaatgggtcgcttagtcaaaagggcatctgtatctccataactcccccaaatgactgtctggagcacacagctgagcacgggacagctttcagaaacactgactcactttttgggttctttgaggtttctgctttagagaatggggcattctgcctgttgctgccaactatgacttcacactgcacagagcagctggctgggagaggagccctgtctcccaaatgtggagatgaatgattgaagggaaaggccaggagagaaagtcagtgaagtgggggagatgtcgaacggaagtgaagttgaaagagcctgagcaaggctgctgagatacaggctggtggagaaaaaagcccctcgtgcctccccgcttaggattggattagctaggagaagacctggaaggcaagaaacgaagaccaggaggaaggctcctgcaggttttggccagcagtagtcagctggagaatggctattaacagctgtttgggggtcctaatctgtggaaccctgaccttcttcagaggaaaatagatcttcacatttaggccttgatgtagtcttttttttttaggaatccagacctgttggaagggcaccatctatgacaaagaaatgagggaggaaatagaagagagagtgacttggaacatcattcaaatgtattttataaagttgttatcagtaagaagagctctgtatgccctatgcaagcatttattccaggggtgtgaaaagaaccccttatgagcagacccagtggacaggggctccttggcaaacaggcagtttccattaagaaaaagcccaacatcatggtggcctggccctgtgttctgaagtattcggaccccaagacatctgcaggcagggctagcacctcacagttttaagtacagggaacagcagagactcaaccttctctgctgggaggaatggcctttgtgtccagatggcgtgaattgggagtgttttcctcagggatcatttgcaccttaacctctctgcactcctgtagcatgtacgaggtgtgcaggaggagagggtttgttgtcacacaggttccttgagagtctgagctgaagactactgtgaagtttattaccattatagaattcagatgcaagtcctgtgctggcctaggttttgaattcttgaattgcacatgatatggtggcttcacacacccttagaaccgagggacaacacccatgagacccgtgggtggtaggtgtctgcacacttgtaaatgcagcttttagtcattttgaattaccaatggcatgctggtgaggaaaaggaataaaactatcaataggtgggctcaggtcaaagggaaactaaccagctgctgggctggtccccagagtctagccagcactcccattccaacatatcatggtgggtaagatatcagggcttgaatctgattgggactggtctggctgaccgtggtgcctaatgtggtggatctgggaagcactcctgttgttaaccgaaaattaataatgcggcgtagacagggatctacatggtttgagattggtccatgagccattagcaagatgctgatgagaaagtgtgagcaggacttgagtccctctgccaggaaaaggaaagatgatggtgtgctcgctgcattgttagagcctagctgagcagctgggatttgggcagagctcttgtcccagattttcagcatctcattgaagtggcaatcagagcctgtgatagagaccctgtcatattgctaaggcgcttccagtaggcttggagggagggctgcagcttggtggttgtattagtctgttctcccactgctataaagaactgcctgagactgggtaatttataaaggaaagaggtttaattgacccacagttccacatggctggggaggcttcaggaaacttacagtcatggcagaaggggaagcaaaaacatccttcttcacatggtggcaggaaggagaagtgctgagcaaagagggaagagccccttataaaaccatcagatcttgtgagaactcacccattatcacgagaacagcatgaaggtaattgccccatgattcaattacctcccacagggtcccttccatgacacgtggggattatgggaactacaactcaagatgagatttgggtgggggcacagccaaaccatatcagtggtgcaggaggggaaatctctccaggaacaccagatgccaggcagagggagctggcacatagtaggtgcttataaataaatgaagtggagttccaggccatacctgctgttgggattaggcctggataaatcagcctgacctaggcttgggagaagttgaacccactgagtaaagatgctctaggttggcggccagtccgggcaggtgggaactgatgagtggcttctggccattgagtccttctttgtggtgaatgcagggggacatgagtgagctctgtaaccagaggctcagagcctgggctcaatcatgctcccaatttattcacggtcacccactatctggactgccatgggctgtgcctcttccttgtgcatagtgtgagaagagagctgattggggttggacgtgagaatcctggtgtgttctggctctgactcccctgactcccacctgtaggtttttccttctctttactcagtgggcaccagcaccacttcctttcttggaagtggtggcccaggctgtcctgctgaactccatttcaggagccagctgtgaggttctacattcccaagcccctgggatctttgagtaaactctgctgctactggcctagagaggaggaatgcttgcaggggtgagggccaaagactgggtctccccagacactttccccggtgctggagttaagggcacagacaccactttgaccttgaggtttccactttgtgcagcgcagaaggtcagtcccaggagatgtgctccaccagtctccctagaagaggggcggttagagtctttgttgcattcccctgtcctgccccactatgggactcctgggatggtgccttgggcctcccttcactaatttggacaattcctttcaggatattaaatgttcttgcccaagggtgaagctgacagctctgggaaggagaactcctgctgcatccatgcaacatttactagggctttttaggagccaggagccccatttggcaccagggatgcagagataaaagacatagtccctgccccaaggatcatggagtcttgtggaggagataggcttgtcaaagagtaccggacgacatgatgagtgtcctgggagaggtgcaggctctgtttggagtggactctcaccagctcacatcagttaaagcctggaagttgtgaaagtagtgaactacttccataataaagggtaaatatttgctccctgagccccccaagtgatgatgcccaatattccagtctaccagccattccagcctgatacctccttctccccaccccaccctgtccctggatccaggaactaaggatcagtgcctggcttaggatgtgatgtccatttggtcctgagtttgtgctctatgaagtgttacttgtctcaaatatcagccctagttccatgatggacagcacagcagagaaatttgtgactgagaaacagggggccaaggaaggctttccaaaggcgaggacatcctggctgagttgtgcaggatgagactctgaggagtgtgtgtcagtcagcatctctcctcagctctctgttttgtgcttcttgggcccttggcattggacctcagccctgtcccaggctacttagacagctctttcccactgcaggttggagcccacctggtcccagcttcaaggagaagcttctgggaatttctgcaaggtctgaatgcttactgagcgcagaactgagcatggggcacgaggagggtgaacaaaataaatagaatgcagcagactttgttgtcaaggaatttatgctctcacaagggaagccaggcagataatgcctagacacacaggtgacaggattacatacatacatcagcagccacctagaaaaatttctcaggaattagagggtgaggctgggatcactgagtgactgtgactgggtggcgatggtttgttaaaagcttaggggagaggaagatgtggcactttggaaccccaggaggagacattcagctccactgacattctgagtacccagaggtgggcagggagaggcaccatggctcagaggacactggagggaaccatatctgggcagccagggctttgtttggctgacttgtaaagtgcaggctgggttatgagaggaggaggaagcagtgggtaaggatgggaagggggtggctgggaagagtctcacactacacgtctgtcacagcctcagccactgaagctacaagtagggttaccctccctgccatggtggccccagtcctgacctcaattcctgcccaacccgaggattgcttttctttttgaagaggaaaataaacattctttgagccctagcatatttcagggaatgtgctagggctttttacaaacactattttagttcattgttatgatgcctccatgagttcagcatcattatctctattttacagataaggaaactgaggccatgggagatcacctagcttgtcagtgacagactggaaagtgaagctcagtgctgaccccaaagctgttattttttttcattataacaaaccgcttccaaaaatagtacagggaagaaccagaggggagacggcatgatgatgcctggcaggtggatttctctgtagaagtaagcacacctccctggagtagcttgatgttttattttctttgagaaaaagatgaggacacatggggacaggaagaatgagagtcacaaaagccatttacacaggtcccattagcaaccccctttcctctcagcttccagctggattcaagcctcaggaaagcatctcagtagtgcaatggtttggacacgggaaacagagaaaaagttgcttctgtcctcaaagggtctgtagctctgtttatagtcccttctcctcagtttcagatttcctgcaggcttaaggcttcctaatagaagtttggtttggtgtgaggcgtttgatagccattgggatgtcttgggcctgtaggggacatgatcgatgtcatctttgtaaaaaatggagcctagaacaagttagcactcaaagaatgaaagctgaaagggttgctaagaggtcctcctatccttctgggcatgaggctgtctaagatagaagctgtagaaataaaaagacaagggaagttacttgcaatatcaggaaggagggactgatgggacttgaatctgagaaagaaaagacctcacagagccttttgagtagatgtggtcaatggatgatactttcatggtccttccatgtactgtgcccagggcagacatcactaatcaatcacagaggtttttttttttttttttttttttttttttttttgtcctgctcaaccatagacctcttctaatcacagcactctgtgttagctcttgccaacccactagtattgtacataagttaaaattgactgaccatctctgctgccatgtttcaagtcaggagtactcattgaaggtagtttgggaaagttcaggtgggaagagtgagccattctgtccatatttgctctttagagttcaggggaatgcatattgtgataacaagaacttcaggacaggagacaggttaggcatcaagggtagagctgtagaactagaatcaatctctaattaggcagtaattgaagtcatgtgaatggagagatgccttcccagagggtgagtatatgaggaagagaacagatggtttattgctggaggaaaggaattgggtggcaatgatgaagtaagggagagaaaagcgaacaagagagaaacctgcatttccttcacttgggtgaggaaggctactgctccagctccttaaatggagccctctggaaccttcagaaattccagagctggtttccttacagataacaagggtgaatatcatttcctccctttcaggccccagatgtaagtaggtgttcctctcagtgctcaggtcttacaggagctggccctggggcctgcctccctcctgcagcccctgctccacattcttctgcagcccccatcccagcccacccttccttcttcatcctgtgacttctctcttcttcactgtgcctcggtcgcatcccggcttgctgtgcacgaaagagagggccaggcatcacaaatgtgatcttgtctttctgatgcttaccttgactaatcacactgacaccctcaggttctgggataattattcctgcaaagtcaaggactccctttcctcctagtgacctgaacttaccctctaacaatgaaaatgccccaagctttggagcgacttttctgcattaactctgaggcagagttgcagtgagaaaatctacccttttaatgggcgaaaatattgccctcataagtctttatgcaatgcacttgagcttaatgctcactcaccaattcgcctttataacttccatattgagtgaattaagtcctccatgcgggtagttattaaagaagtgataagtgctttataattcagtaaagggtggcctggccatttcatattttcctaaggaaattggccacccaaagggcagcattctcagaacccctggggccagctgattttaggcacagagctcgcactattggattactttcaagccagctgctcaggcctggaccaaactccttctcactcaggcttttccccccaagaccccttggggagtaagggtcaaaatcaatgtctgtctccctgcccgaggctgtttttactcttgatcaaaggcctccattttctcccctggttcaaagctaagatgcctagtaaggatcagaggttttataatcaacatgatttgattctcatttgtagacaggaggagactttctccaaggggctacaagggttccacccctctgaccccaatcccatgggcacagcttgctcctttatgctttagactcttcaagtggttggaaaaagtgctgtcccaatcaagaccttggtaaccacagatttttcatgacttgttgagaggtcacagggttctgaggagggacagtcatttattaatttgtttatttaaaatttctactatgtaccgggaacttggatgagtgctgcagatacaatagtgaataagacaggttgcctgccttcagggagcctgcaatgcattaggagagagacacaataaacaagtgaacacataggtgacataatcagaggttttggtaagtgataataaatgagttatctagagcatcatttctcaaccttagcgctactgatattttggaatggataattctctgttgggggtgggggctgtcttgtgcattgtaggagattaataacatctctggcctcaccccgctagacaccagtggcaccgccccaatagtgacaatcaaaactgatgtcttcagacaacccaagcctggggggcacagtccgcccctgacttgagcatgagcactattgatctagaggaaggttcagagaatgaccctagctaggttggtcagggaaggcttctctggagaagtgacatttcaaaagaatcctgaagctgctgtcttggccgagggaaaaataaatgcgaaggtcctgagaggagaccagtgaggctgaagtcaagtgaataaagagagagggaggtttcagctgaggagggaatggcatatgttacatgaggaaggatcctgctggtcatggtggagtcagaattttcccccaagtccaagtgcaggagaagccactagaggttttttgtttgttttggtggagggcatgattaaatttatattccaactaattcattggggtttctgtgtggaggacagattttaattgggccgcagtggaaacagtagtcatgtttgggaggcaggggtctttatgaaaggtgatggtggcctggacgcaggtgataatagtggatgtggcaagaagtagatagagttgaagggtagaatcaatgacagggtttgtctgggacaactccatgataccagtgtcatttattgatatggagacagctcactgggaggaaagcaggggctggtattggatctgctaagatgtcagctaaacatctggagctcagggaaagttctgccagagatgcacatttgagtgctatcagcacaaggacggcgctcagagcagagcacttgggggagatcaccttggcacatgagagaggaagtgaatagaggagccccaggctccctgggagactccaacatttaaggatcaggcaaagaatacgacatcagcgaaggagcctaagaaagaatatccagagagtagaaagaaacccaggagagagtgtagtcaaggaagccagagaggaaagaatgtttcaaggaagaaagagtggttaacagggtaaaatgctacccagagattgaataatgggtgacagagaagagtcgattggatttgcaaacataaaaatcactggtgaccttgacagtgcagtttcagtagagtagtaggatcgaagacaaactaggatggagaatcaaagggaggcgaggaagaagggcctgcaggtgtagacgattcttttaaaccatttgccataaagaggcgtagacacatgagttggtagctggaggaggacatggagtcaaggaggttttttttctttttgtagatgagctttcctaaaacatgtttatatgttgatggaaaaacatagcagagagacagttgagggtagagaagaggaagaggaaaaatgaatatgttcctgagaaggtgggaaaggttgaggccgggtagaaagtccacatgggaagctgatagctaaatggttaaggtctgacattgatccctttggggattcgttcatttattcgcctagtggtcactatttgcataacactggaaccacagcctcctggccttgcccttagaaaactcatgctttggtgaaggccatagtcatgtagggacaggaaaggtggaaaagatgtgcctgggtgccaaggacatttctgcttcctcttcgtttggtgtgtagggccctcctacttccccactgctgaccctgacagtggacatcaagctgagacctgggcctgggagggagctctggatatggggcccttgagacctctgagatcaccttccccttgctgctgtgccctgcagttatgcctccagcatgcctgtccctgggtgggatgttcagtggtgtgctcggggccacagctctccccagagatcaagttcagggtgcctgtagggtcagaccagggccctgggctgctcagggggccagggtgagggccgtgcaggtactgagggtggagatcctctggcagtgaggtggggcagctgggtggctacatagtaccgccctggatggctttccaggtgtatacttactcaggggtagtgccccaatttaagattctgggggtgagtaaatggtgagtaagacagatatgatctctgttctcatgcattatggttctaatgtagagacactgatgacaaacacataatcaaataatctaataagacaattacagatggttattaagggctgtgaaggacataaacaggcgtttgtgccagagagcaactggaggggaaatgcaggggctgctaacacagtggggtcagggcaggcttctccgagaaggtgatttttgagtggagatctgagggattgaaagaagccagggatgagtgtttcacgtaggaggtccagttgggaataagcttggcatatttaaagaccagaagcaggacagtgtgactggagcccacaaaacaaggggagtgtgttcagagaaggagccctagaggcatctggtggccagcttgtgcaggaccttgagggtggcttccagtgatgtctggacatcactggattttattgtcatagccaaaggaagccattggagggttttaggcaggagagagtggttgcaataatgtagattgttgaagagggaaagcagggaggccaggtaggaggggatgcttgttctccgggttagaataggtggtggttaccgggagcattgatgtgtaggcaagctggggttgccatcctgtgccagcccaggcagcagcagtaaaaatagaagcagataggctggggaggggtaggataggaggccacaggctggggttcagccacaatggcctggactccccagtgaactggctggctcccaggtgaaatctcgctcctgggagttagcccttttcttagtggggtagcagtgaagatgtgcccttgatcttttcctgttaggagacacagcatctttgcacctgcagaacacaggtgtgtgcacaaacgttcttcattcctggcacaatactttggaattgatcaggaagccagcacagatgctgtcgtcttccatctgtttgctgcatgatctgaatgttcctttctgtggtcccaggggtggccccagatgcggggctggttcaccgtggtccttggcgcacagctgcttgtaggcttgtgtgctaacgtgctggcatgctggggtcaccggcacaagccgtcccaacccctggctgcctggggctctcaggtctggctccccaggcatctagcacactgtcccccacaacagctgtcaagggagggagagccaggtgacttggctagcgtgatcccatgcgctccttcccagcccccttgatgccttagcaccatggagctgttgctccagacggtttgtttatgatgctaaacatatcagataattgaaagctaatgttgctgtctggatcactagacataatacgcctggataacaaatcaatttcctcattgccctacaaggcttcggagtcaaaagcgcggcacattgtgcgtgtgtgtgcacacgtgcattcatgcgtgtgtgtgctccaatgctgacttgttaggaaatggaattccagactagcttctgcaggcactagctggagagaagggacacctgtatgcaatcttgtttttgaagcttttgaattttgtgttggaggagtagagtactcacatataaaaaacatccggaggcctaggcaggctgattgcttgaggccaggatttcgcaaccagcctggccaacatggtataaccctgtctctactaaaaatacaaaaatcagccaggcgtggtgacacatgcctatagtcccagctactcggtaggctgaggcacgagaattgcttgaacctgggaggcagagtttgcagtgagctgagatcactgcactccagcctgggtgacagtgaggctctgtgttaagacacacacacacacacacacacacacacacacacacacacacacgggaaacatcagcttcagctgcctcctgccagtattctgaacataatgatagtgtcgtacgcttaggtaccgccatgtaaatgtgaattgtgactgcacctccaggaaagcttcacttaactggcaacttcagttatccaaaagggggagcaaaacaaagtcatatgaaaacaagggcaaatatctgcctatctgtatgcatgtgcatgtatgtgtgtgtgaatgttttcatattcccttagatcctatttacgcttactttacatgcatttctaacaatacaaatggaatcagctatttattccactagtgccatgcatccacagtgaattgaggacttaggcattaccttctctaaccctcaccacaactagttttgctatggaaaatctgatggctggagaagctctagtaactggcctgaaggcatctggcttccggtgctagcgtgtcatctccaggtcagcctaattccaggtgccagctcttacctattgggctccaagaggctgcagaggatactgggcacagcacatttgggagggaggaggggccctggggacagcttaagaggtgatggcctgcagcctaatatcaaaaaaagagccagaaaatagttaaaatggatgcgataaccgttggaataggaagtcatatcagggtagggccatttgtagtagggctacaaattctgcatccatcaagagcttctgagggttttgctgtgctacagcctggcaggctcattaggctggtcgtattgatgtaaggtcatcaagaaaatgtaaatcatgatctgtctactctgtttaaaaaggcaaggatgtgtgtaatgcattttaggtggaaaaaagaaacatccagcagggaagttgaaaatgcaaagggttttgcatttaaatttagttgtctggaaaatttggttatgaagaagagctcattaatagcagtgagaagtcacagtgaagataacagcaatctgacagccagagaggagcgggaaaagcttagaaaaatgaggcaatactgggcctgctacctgtcgagaaaggaaggatgttcctaagtcccaccgaccgagttcctgtcttgccaagtgcccagggaagttctgccaggtaaagggtgccttgtccctgttgacttcctcaatcaccttagtcctctggggttagatggtggtgggcgtctttgtgttctacaattttctgcataggagaggagtaaacatgaaacattaaatattgaaggtagaaacaactcttaaacatatccacatgacatatttttaattaaaatatggaccacacattctgtaccatccaattttggaatgcttggagattgccaattcgtttatcatactggcccaagcaaaacagaaggaagaagagaaaactggggtacaaaagtaccatctggttggcaatggtggctcacgcctgtaatcccagcactttgggaggccgaggcaggtggatcacctgaggtaaggagtttgagaccagcctggccaacatggtgaaaacctgtctctactaaaaatacaaaattagctgggtgtggtggcacatgtctgtaatcccagctactcgggaggctaaggcaggagaattgcttgaacctgggaggcagaggttgcagtgagccattgcaccccactgcagaggttgcagtgagccattgcactccagcctgggtggcaagagtgaaactccatctcaaaaaaaaagaaaaaaaaaaaaggaattgcaatctaatttattctagcacaaagaatgtttgtagtccccatgaatgtatcaattaatatttaatttatgccatgtcccattataaaaatggctatgaagcagctatctgtggtcctaggtctctgggacctggtgttgctgttatgagtcactaagagtgggtatgtttcagactgattttttagaattgccaaagagactctgcatggccattccctgactccatttcccttctaagcccacctggcagcatcatgagatcttgatcccaggggtctaccttgacatcactgaggtttttgagttcctgccctaagcccgactctgactctggaggtcaatgtcatcatgtattatgccccactgtctccctccgtctggaaaagtggtgcccaactagctcttggcagagtagtggctctgtggaatggaagggcagtggtgagagggtaggagcagggcattgagctgattttctgaatggagcatttcacatttctatggaatgaagaggcatgagaaatccaggagaggaactttcagtggagagaaaaggctcttggccagtgggttccagccagagatggtgagaagagaccactgttgcatctggaatgtgtagcctggcttgggccacggtccagcaggccaacacacccctcatttcctctcaagaaatgcctgtgacttgagagggtcctgggagctgtggcttgcccattttttcctctcacctggactcagtgacctagaggtagacttttttgtattggcctgaagcctggtagtgtttgctgcaaagcagtcattttcaaaattgatgttgttttaagccatgagactcttgctttaatagccctcttaggcagaagctttatataataaagcaggatttctcaatcctggtgctgtggacatttggggctgatgattcttagcggtgggggctgtcctgtgcattgcaggatgtttagcaacatctctaatctctacccactgtaggccattgttactctctttccccagctgtgacaatcaaaaatgtgtccagatattgtcaaatgtctgctggggggcaaaatcgcctccctttgagaaccaatgtattatgagactaaagtggaggtaatttatttaaagtaggagtgggcacctgatgtgccacccctttgccctctttctcctccctccactctctgtttctgattgaaccaggacacccagattgagagcagagctgcaggttcctgtgggggccatcaccatgcactctgcagaattgcacagtcccttgggcattgctataaattcttttcctccacagcgggagtgggtttgtaagatgtccgggcagggatgagctggtccagcctgtggtcctggaacagggaaaccagtcaccgcccccacagggtttaggtgcctggcctgcctctagaagttaataggtattgattttttcttttttttttttttgagacagtgtctcattgtgttgtccacactggagtgcagtggtgtgatctcggctcactgcagcctcggcctcccagattcaagcgattctcctgcctcagcctcctgagtagttgggattacaggcgcccaccaccatacctggctaatttttgtatttttagtagagacagggtttccccatgttggccaggctggtctcgaactcctgaccatgaatgatccacccgcctcagcctcgcaaagtctgttttgcaggcagtattgattgattttcaaatgacaaaacaaatgctcaatgaaaacaacctgtacagcccagaaaatcacaaaaaaggagaagccacgtgtaatcgttctgggttgagatactcaccattgacaaaggcaaaccaaacctgctcttttactatatatatataatattttctagagcctgcctttttcactgaaagtggtggtctccctagtagcacacacacaccagccggcagagtcacaacactgacctcctggttgggtaccaagtggtgagtcataggagaacttggcaggtgcccagctgatgccatccggaaatgtcagggcctcatcttcatcctcttgctcttcctcggaacctgctctgatgtggcatctatgcactccttgaacctgtgtataaactcctgctggaacagttttcctggaggccatgaatgacaggtttccttcccctccacactctgccacatggggtttttatcaatgattgctgagacatgacaacttccagcagaagcctgataccatttttagcttgaaaactgagaacaagactgctcagtttccgtaaggcacaggaggaaaataatcagcacagccagctctgcctgagaacttacatgtgccccacactgcaaaggggttttcttttttatcatagtcttttgatcttcacatcattcttacgaggcagttattttattatccccatttaatagatgagaaaactgaggcacagacagagaagtaacctggacagggtcatatagataggggtactggtggggccaggatatgcattttgaccatcagctcctagggcaggagtcgacaactgttttctgtaaagggccagagagtaaatatttcaggttttgcaggccatatggcctctgtagcaactattcagctctgttattgtagcttgaagagagctatagatgacagtaaatgaacaggtatgaacatggaaatttgaatttcatgtagttttcatgtgttacaaaatataattcttcttttgatttttaaaaatgtaaatgctatttttagctctggggctgcaggaaagcaggcagcgggctgtagcttgacgaccactgccttagagccctgactcctacccacactgttgcactgtggctacaaaaatgccattccctgatttaggaaaactcagacctactcaacggaggaggtggggactattattctacttaccggaggactctttgcagcaaggagttcattcatttctctgccatatctcagtgcttgcctaagtcagggaagggtccgtttgtgggcataaggacatgagggctgagaagggtaaggcttgagaacatggtaatgattgacaactcaaccgtaacaacacatttatggaattctaatgtgggctgtgaaaaatgatttcactgatttaaacaattggataaaagttgcttgttgggagcagatccttgtaggaagctggagtcctgtgaatgagaagtattctgtacaatcatggtgatctacttggtaatttacaaaacccggggaatacactgggggacctggtggcacagatagttctactcctctggcgctttcttttcatctgaaatgttgccaggttctctgccatggtgagaccagaccacccaaactgccctggggctgtaaggcttccagggagaactttggcattggaatccaacaccaacctggccacctggtccatgtccccagcagatgccagtgtctctggctgctcagcagggactttgggagaatgtggtacaaaacaggttctcagcataccttgtcaccgtgtggctctgaaatgcttccagaggccctggcagtcatagtcctgctgccttgctggctctgactcgagttggtggcagatggcagagctacgggtgtggtggtgctggggaggagatgtctggggaaggtggctgtcacttttctggacagagtgtgcctgggttagttctgtcccaggatgagctgtcacctctctgcactcttcactaagattgaagtacttagaattcatggccactgatcagagtaaaatcctgggaggatggggtgggcagtggaaggccttttcccgagatcctttggtgcctcttgggatcacaggtgtgtatgaatgggcacattcatacacctttagagctgcaaagggctttgataattaatagtgtaatggttctcaacctggggatcccaaaagcagtaatgaggggtgtttgtttctggcatttggtcaatacaaaaacaataaacccagaaatcagatccatacccatgacaagccttctcatgctgacagaatgttgagtttctttgctttgggctggaatttatgcagtggatgagttagcacgggtttgtgtctgttgataaaaagctctggttaatagtgatttatattgctgattaataaatccaagaagatgaattaattagtagttaatagatgtagtgtgcttgctagatataaacctccttaaacatgggatctcttggggcaaagttctaaaaggagaccttcatgatgaaaaggggagaaactgctgatccagtgcaactctcctcttttacaaatgaagacatgagagactcagagaggtggaagcactggctcaaagtcactgggtcctgaagtctcagatgaagctagggtttgtgtcctccactgccaggttcccattctttccatgacactctagtggctccaggatccttaggtggcccccactctctggagtcagctccaccaaatcaagccattggttttttgagctccaggagggattgggctgtgggtcacccaaagggggcttccagagtctagaccctggtgatgctggaagtaggagtgtgtccctccttggctatgcccactggccagccggccaccccgtccttttttaaagccatgtcatttgtattgtctttatgggcaataactaagggaaaaaaaaggccagtccttaggaaattctgaataggaaaaagaaagaaggggaacagaggaaaactgagttaggaagacaagcagggagattgaacttcacgtctttagcatctttttctagctgatggggagacattcaatgcaatccatgggccaggaacttggatccaatgaatccagttaattcttgcaacaacccaatcaggcagacggtgtgaaccccaccacgcagaggaagaaactgaggctcagatttatttggtgacttggcaaaaggcctggcaatcaattagctcatcggggatcaaagccaggtctctgtggctccaaagccagccccatttctgttgcttctggctgaccgttacctttcctcctcccctgcagacacatagagaactggcgcagtcttcacacgctcaacgccgtggacatggagctctacaccggacttcaaaagctgtgagtacacccggccacagagaggcctttccctgtggaaggggtggatgccacctggtctgccttctggggtggcgtgaggggcacagcaagactgccatccgtgctttctcccccaggtcttcttttggtagagttggcaatatgcacttaggggacaccagaggcttcaaaggccatctcttcacacccctttgtctcaccctagtctagagaggcaagggggttgtgtgaattcccatcttgaaggtagggtttcaaggcaggcctagaacccaggcatgctgggtgagtgtcctttccctacccttatgcttgactgatgagccccatggagtatgagatttcccagctacctccacccttggatgtcggtactagtgactgtggggacctggagtggggagagggacaaggaacaaagagggctgcagccctgccattactggaccagcagaagccctggtccttacctactggccaggatgggtggagggcagctgccagtatgacccctgacctcccagcctcacggggccctggggcgtgtgagcccaggtgcctccactgagcaaccccagcaggccacctgtgataactggcaatgaagaggtgtagataatccacagggcggctgcagggccagccttagcctcaccccctgccagcctcagcccagagcagatatccctctgccacttgagctctgctgatcctctttttctctctgtctaggaccatcaagaactcaggacttcggagcattcagcccagagcctttgccaagaacccccatttgcgttatatgtgagtagagctgggctgcagggattgggggcacatggcaggtactcttggggcagtgaaaccggagacctgaggtctagacctggctttttgcctccaggggctcttgggcaaggttttgaactttattgggcttccaattttgcctcttaaaaggattattttgggtttgatgatctctaagtttcctgtcagaaggaaaaatctaggaccaggggctgagagggagagtcagtctcctgacacccaagtgtgttcactttcatgatgaaacttgcaattttatgggaacgtaaatgatagggaattccactcatatgtaatgtgaatactatacttctgagaccataagtaggcccataagagtgtgtatgtgtgttaggactggcggggggcgggggggggttgcaagaagaaagaaagtatggctaatagccagtgttatgtctaaatagatctgggttcagtggggaaaagctcagagaagtggaaacacctgtgtaatgtcacacagctttgtttgggacaagctagaggtcaggtggttatgggtgggggttcctgtctgtgcctccttcatcctgtctctcccctttccctagtggggatagaatcacaagagttgatgcttcctctctaagccgagttctgggctgataaactttgggatttaatgaggactgccatttcctggggagaaagtgggcatgaaaggaagcctggggtgagtgattaggggaagtgccaacctgctgcacctgtagaggggtatttgttgtctgggtcaactccaaggatagtggccatctcggacaccctttgggcatgttcccaaagagcagaggctctgcaggaaccaggtggggaggggtctattgcctttggggagaaagtggagaagtggtgtgctatgggctagtctttcctgtggccacttaaaagtttcactgactgagcactttgcatttggtaacggagggcagctgggctggagagaaattgcatgcaccggggcagaacatccaggggagctgtgggaagtggagggtagggaaggtggggaaagggaagagatcacagtgaatcctggtggaggagttgttttttcttttttgggggatcctgaccttacccccaggctctttgtgttttcccaagcacatagtgagtgcttgataaatatttgtttatcagtatggccacctctgctttctgcggagctttcttttctctctctggaaagaacaggctctgtggtcactgttcagggccaggtgtatcagccccaggggactgagacctccctttcagctgcctaattaactgttgccccttgccccagggtagcctctgtggtgagagtctcctgatgtgtgttctttgcagctggaggcatagctgggaccagaggagggtcttggaccagatgttccaggtgtttattttattgggggtttgagtttcactgtaaaacatcctaagggaaaaagcttttgacatctgagaagtctccgttttcatagtaattcatacaagggtcacaaagccaaatgcccatggtggaccaggtggggtcacgtgtcccctccaaagaggcaaccagtcatcagttccagctgagtgatgccacgtggaggtggggcctggtgtggtcagacttgtttccagaagacttggagattccgtgaaacaactcaagttttaaatgctgccgactaaaaacaagacctttcaactccatgggccaaatgaaactacttctatgagcagaatgtggcacacagagtgccagcttgtggtgcgaggtcgtatttgggggagggatgctgttgatgcgagacaaaccctgttctctttgaggacaggggctgggtgctcaggcctcagaaccttctagggcacggtgtccctgcagctcttagggagatggagaggcttcaggacccaggctcaggagtgggagcagggttacatcttgggctgcaggtggctctgaagtgggttgtaccagagcatgtctttggcttgcccttgaggatcctggaagagggctgtgacccactgtctcttttggaatgatatggggtctgctgagtggtggcagcgatagaggctggtggaggtttgcaagattcccaaggctttgtgggtaggaggacctagttggaggaggacccaaggataccattgaacctgcccatgactttgggccctgttttctcctggacacattggccagctcttgccaaagtacttgttattggctacagggtgattaccgagaaggatggatgaccattagtttacccccaatttgagtctgtctgtgcattaggggcaagtcagggtgctcaacctagttcaagaaagtcagcacccagtcaagtggctctcataggcacagtgggatgcccagaggagcctgggggtcgcagagagacgagtcaataggatgaggcagaagcactggctttatccacgggttttatttattaacttttcttatttatgaagacacacaccaaattcccaattgagtaaatttcccggcagctttgggacattttctcctggcaaatgggccaggtttctttgctgtctcacaacatcttctatttctgtcctctaaatgcatttacaagtcttctggccccagctgagcaatcacaagatgatcacttactccaacactaattgccgagccctggcttggtggctttttttttttttttttttagggtaatggctgagaagtcttttcttctttcctctgtataaaataagaagtaggaagtgatatcattgcccctagtactgatgtcagattggtcaagttgttctgattggttgaactgtctcccacccctaagctactgttgcgttaatcagtgtaattcttcctcatgccagaaaatgaattgacaaagttttggccaagttgtctgctgtacagtaggctggagattaggactcttgggccttacgtcatggtttatgagtgactgaccatctcctcttgactgctttagttttctctaccttttgtagattgcggaaaatgagatatggatgaatacatatcaagggaaacccttttttgagagatgggaatattttccacccttgtatcccttctctgatcctaagaattctggattaaggatttttaaggataaggatttctgagattgataattgcaatagctgtatgccaatctgaaaagtgggcataataatagtggctattctagggatgggatgtggtcaagattaaacgataagaggcacatacagctctcagcccagtgaccaggaaatagtgagcgttcagagagaacagttgctagtaatgatagtaattattgttattattcctggtggtgatgatagaatcaaagagaaggggttaggtgaccttgatgggtattctgaccacttctttgtcctgaaaaagctgaatttctgtctcacagtggagcccacctctctggtgactggaatactcatattctccagcgtctttcttcattgtacactgatgaataaattcggataagttctctattctcctcttttatccccttgctctagactgtatgtaggcctctctgtagatgctgtcagtttcagaaaggagttaaggaactgaaactgatgagctgacaactttctttatttccacctgagttgagatctcctccaccagcattattgaacttgggttgttctcagagtcctctgagcccagcttctgcagctggcccctctttccctttatggggtgtgttttctctggcatggctcacacagactggatcgccacagtctgggatccccatacatgaagaatgtagacgtctgtctgagctgcactcaaacaatggtacttcctttcacctgtagagctcttcgtggttttcaaagtgcttttccatacattatctcattgaattctcataaccatccttggggcaggggtatggtaggtggctttgttttacagcacggaagataggcccagagaggctctgacttttaagtagcagaagtagaactgtacctaaatcctctgattctctttccaggaatctttccactatagctcatgggccagaagaggcaatgttttttcacagaagcaatttaaaaagttactatgttttgctagtcattactatgtttagaaaaccacataaaactgctggtatcagaaaagaagagggaaaggctaatctggttgagaacttcctgtgtgccaagaactgtgcctggtgcatttgcaaatatgaactcacttactccccacagtaactctaagttaggagtcctctcttcccatttcatagatgcaaacattgaagctcagaagttataactgagttctcctaaggttatacagtaagttagtggaagaatcaggatgtggactctaaatcctttgaatctgaagtccgtgtacttttttacgtcccaggagcgttttttctctctggttttcacagcaagaacttcttataggagaggtgggcatctttaaagttccgtgaaagagctgctctttccccctggggattcagcacgctccatcctcaaagagctctgttgagaaagctctgtttagttcctctttctattcaggtcaaatcctataatgacagttacattacaacctgaatatctttattatgaaagatttcttagcattagcctatggcctacttatttccaagaatatttaatgtaagattccagcaagccaagagaatttatttaatccctagagttgattgtggtgggatctctcttgggctccatttcttgctcttttccaaaaagctctggatgccggactaagttatttctccttttggaagcaaacgtgcactcaatctttagctgggagagtcagccatcagagtggggtaaaagatggagaatgtcctgatttgagcatgattgtatcaactgtgttatgtttgcaaagagaggaagtcagtgatgctgtgcggataggaaaagaagaggtggctaggatccctaccctttcaggacactgactgcataggtaataaatttctcttgagattattgaggtgaaaaaatggtgacatggatttattatgtattataaattactcaatgttctttctccttggaataaccccagattctgagtttcaagatgacatgtagacagtatctcagtaaatttttgcttttctgccttcccccttacctctgcactgagacttttctccaagtcccaaaaggattggcaactggcacactggtctccctcactgcttctccacaagtatcctccttcttctgttctttgtggaggacttagccatgaaatgctggatagctgacagtaaggagcatgggctttgaagatagaaagatcagggttcaaatcctagatctttcacttcctgctgttgaccttaggcaaattattgaacttctctgagctttgaaaggaaaataagagttcctacttcataggattggtcttagccttaaataagacaacgtctggaaagtgcttaagacaatgtactatgaaagactcaatatatatgtttttgctattaaagatttcctcccaacacatgttggtctccaattgtttagaatcatagatagttaaagctggaagagtccttagaaccaactcccaaatttgtattcctatcgtgccctttagtttcctatatcaaactgcctacttgcatgccccagtcatgagtcaaccttaagctggccaagacaggattcttgatttcataccaagcccttcctcctaacctcttcttcctcaatgcttcttgttcttgtaagtggtaccatccatcaaattgctcaggccaaaaccttgggagacattcttgatgcctctctttcctttacctgcctactcccttcttctgacattcagtttaataaattcataaaatattttgtatccatctgcttgtttaccctttccatcctcatatctattgtcttggtccaagtcatcatcccctcctctgacactgtgacagtagccttctaacttaggttttccacaccttcacttttgtctgctacatttcattgtccacacagctgccagagtgatattttaaacatataaatccgatcatgccacttagctgcttaaagccctccaattacttcttgcgttacttacaataaaagctaagcccctttccatggccacaggactcacatggatatagtttctgtctccctctctaattgtcttgtacttttccccttgttctctctgccgcagccttacaagccttttcagtcccttaaatgtgccaagctcattcccacattggagtttttgtccctgttggcccatctgacccaaacagataccctgccctggatcttggcatggctggccccttctcatcattcacccaaatgctactttcttagcaaggcctcccttgactactcaaactttgtggccttccttctccttacaaatagatcacattttattccgtcatgtggctgaataatttccttcgcctttattactattgatcatctgcaagtatctcattcagctatttaagagttgatactctatctcccgcactggaatgtaaacttccgtggagcagaaattttccctgctatatctccagcactcagaacaatgcctgttatatgccaagtgattggtagtgatttgttgcatgtacaagtgactctagtctgacttgatcattttctggatgacaagaaggatatcttgagtggaagaattctgaccaagatctccatgggtaagagctgagccaggactagaatgtgggccttggtacgctctgtgtgacattcctcccatcatatttatcctgtctactttctttgggtcttacctagccagggatcctcacacttctatgtatggtagaaactattgcagccctgtttaaaagaagggacatatgggccgggcacagtggctcacgcctatacttctagcactttgggaggccgagacaggtggatgatgaggtcaagagatcgagaccattctgaccaacatggtgaaaccccgtctctactaaaaatacaaaaattagctgggcatggtggcgcttgcctgtagtcccaactactcaggaggttgaggcaggagaatcacttgaacctgggaggcggaggttgcagtgagctgaaatcatgccactgggctccagcctggtgacagagtgagactctgtctcaaaaaaaaaaaaaaaaaaagaaggggcatataggcaaatattacatgcatatcacttatattattggaacgtacaaatataaatagtacagaatcatatcgcagtatcaccctgctgaggtgtgatacaaaaatgtacagtgaaggtaggtcgcctctttgagatttcttctcattcagttcttcttgctcagagcttccatcaaacatcctgcttaagctattgcctctaacccaccctcatcactaatttggttatttcgataagtagttgagaatatgtgctcttgaaccacatggcctgacattcgattctggctttatcacatatatctgtatatcttgggcaagttacttaacatatctatgccttaatctcctcatttggaaaatgggaataatatggttgttagcaagattaaatgaattaatgtatatgaagaattgaggagaatgtctggcccataacaatgacccaatatatgttagtggagattgctgttattattctttagaaaattggaacgtacaaatataaatagtacatatagcagatgatcaatatcaatatcatctaaaattgatattctaaaatggatcaatttgattctaaaattgatcattatcatgatgaaaatattctaaaattgatcgtcagtattctaaaattgattcacaactctgtgaatatatgaaaaacttttgaattgtacattttaagtgaattgtgtatatctattgctctatctctttatgtctctctctctctctctctatctctctgtgtctatcctgtgttccttcttagaagatgctttcagagcctgtgtggggcctactatgtctcttttcctctgccgtggggcaaaggatgttactgttccagatggaggctgctccattagctggcgtcttgttgggaagatgatgggagcaaagccacagctgacctctgttgacatgtagtgggagagagaaatacacttttactgtggctaagaaaaagaaagaaaagataaaccaggaatgacagaggctgtaatcagtgtatgcagtagataggctactgggggtgcatgaaacttggtgtctaatctattacccaattcttttctgtcctactcaagacagggtctcagaacacaaatgagagagatgttattacagggaaagttttgaacctcctctaatttaagtataaggaagtaaatggtgagtggtggttcttcatcagtggctatgggttgttggtgacacagctcacacctttgacagattgcagaaacggctgacattctccagggacttccagcacaaggcagtggaggtgccgctggagggctctgagcagggctgctgacccgagatgggcgggaatggctgggcagccttatggagcaggtgacagctggcctggctttggaggagagtgggcttgggttggcagacagcctgcttatggcacagggctgcagcttaccatggggtgtgcacagctgtttccccctggactttctgctagagctgtttggacatgtgctgatgggtacaggccactgagcctgtttatcaggtatactgaaaaaattgccaagggaacagcatttggaaatggagccatttgtccacggaataggattttcacagagtgaatgatgtgggaggcttgagtcaggactatatgcagtggtgtgtctgggtggaggccaggagggaagatgctgggctttgggtccatatgagtatatgggaggggctggtggggatggctgtcaatcattagaggtattttttggctgcagcagggataggtggccacatcttgcacatccctttggctctttcttggccttatgctgtgacgttggataagctatttaacccatttggtctgttttcacatctcaaacatgagacagtgttataagtggcccaatcctgacctcatagcattttgggaaattcttcctggaagaaaggttgcatctgagacacagctggggccactgaggggcaggaccagaggaaatctgttgtctatttgttttagttttacccactttattctactcccccatctcacctccctggaggggcaggcattccaatgcagtgagttccagggacataatatcagtgaagcactgactatagaccaagcattcctctatgcactttatatgtcatttcatgctcataatagcaagtggacatcattgttgtccccattttacagatggggaatttgaggcacagagaggttgagtgacttgcctaaggtttcataactgctaagtggcagagccagaaaccaactccaggttgcttgcctctagagctccagagcctccactctaccatctcttggccaaggccaactctggtcagccttggctgttttcaattcaggaacccagctggagaagagagggaggcagtaggcttcagagcagcactcctcaaaatgaagggcagatggaggggaaggcccatgggagaccacgaagggagtgcctgaaaccatgtcctgctttgcacctggttgctagcagggtctgggtgaatgggcaatgccccttagcctactggctggcactggggagggccattaacagatgattacacagagtgggtatttagcatagagaatggagcctgatgatcgagcaggtggagatgaatcatgctgtgatatgtcgatgcaggagtggcagatttctattttccccatttccagggagcatggggctacaccagccctggatgtctttggcccatttcgggcaggattatgactgtaggtggcacaccctgttatagaatgggaaagaaggggatatgggccagagtagataagctccaaggctctgtctgctctaacatcccaaaattttgtgcctatgtgcgcaacttcaacatctgacacctcctagtacaatccagccatgctatttctgtaggtgtgcctgggtccccgcattctttccatatcccagcccctatggcacatgataacactgagtggcgcctttattgtcctcttttaaatggatccttcctgcttttattgaactccaaatgtgttattgaaccccaaatgtgttttgcaccgcagaattcaccaagcttcagattttcaatggatatttcttagtttctactctcatatctgctgcctccaaagaaagtaaattcccagtcccctcataccattagtctcctgggtgcctgcctcttctgaggccctgtaaaggtactgctcctggtacccttgtgaggcaggtggcaaacttcccaaattgaatttcctttttcttgtctgcttgtgtctgtcctccagacgccctgtggtcctgagattactcatgccccccaacccccgatcatttctttctgttcactttgtttgtggaccacattctgattcacccagggccagataacatggccacgtgcctcacctgctggcccactgcatgtttgtgatatgtactttgaaattcttagtcgaaaaccctaacctcttcttggagactgttctttctgatttcaggtatctcagttctctagaatcccctggactgaaccttaagaattttcttataaccctgtcagctgttgcctttcaaaaactcagtgtaatgctgagtaaacattctggcctctgggctgtgcatctcctagtcttggggattagacactgtgctcatgttttccatccttgattattctcagtagattttcttctcttttttccccctcttccctaaggcttcattacctcccatttgttcacatctcttttctccatttttcttgttaaagacagatttagaaaatgagtttagtctcttggctattttggagtcatcattaatttctgttcctcttcattccttagcaggctaacaggtttgtgtctctttctcccttgtttcctcttaatgggtctttgaaagtctcttttcttgctgggttaacccctttgcctgttggggcttgccttgggtccaagaggcctctgccctttctgggtggtattctaggtgatgcagccactgcgattgttctgggtttaaagggtactgggtctcccagatggagtaagtcatgcactgcctctggccgacttcatgcaaactgcagacagggtctcccaagatgcaccttgaaacccatctgaggggtccaggcgaggcctgaaatatgcctgtggaaaggtatgaccctctcaatgatgtgtacgccccatgggggcaaagactagtctccctaaatcctgttttctcaatgtaaaatttgtatttggagaacaaatggccgactgaacgaatgactgagggagggggagaaagaagaagggaaaacaccacacactttgaaggtgggcagactaggctgtgaacccaagtttgactttgccaactctttcactttgcattcttggccaaggagctgagcttctgtgtccttcctaggacacaaggaaataattcctaccctgcagggctttgggtgaggattaaaggagtgaacataaagcacctttctcagtggctgcacatggtaggtactcagtaaatggcatgtcccacaccttggaagctattttagaaccttgatccttattaagggtgctcagaagcccaagctcgaagcccctgggtttgaggcgtctttgggattctgccccctgtatgtggggagagcagaagctaaaggggaaagggagttacagagccggggtggggatctggctggagccccccagcagagaccctccatgtcttctatggcagcctcaacacacatgcacccttgccagctcatcagtgtattgccattaccaagagggagctttgtcagtgtattactgttattctcaacgaggaaattgagatagaaaaaaggggtgtggtgacctggagccagtcctgtggggagatttaagagctggatttagagcatggcttgctggttcttaagcctccattgcagcccacttcagccctgagtccctctcccttcctccgacagctgtttctctttggatctggtcaactgtccacctcaggttttacaactgcatttctttaatgtggttgcctttggctttttccgtgattgtgaagtctccacccaggataactcccatcccatttgcatctggagggctggtttatacacacagaggggttgaattctctagagggcctggggtggaaggcaccactgagggctacctgtctgtctctgtgatagggtgacctggctagatgggactgcatctgtcttgctagagctgaggctttgctgatcatcagagttgcctggggttgggcttaggggagtcgttcagttcattttagaactgactttccagagtgatgagggccagggaatcctcagggaccctacagtgggcctgttgggaccctgatccatagcctacgtcctgagggtgtggcggtctggttcttctgctgccctggtcgtggtcaacatgttgttatggaacatagaaagagtgcagacctgttctctttagatggtgcacaggtgacttccttctttctctgttcctcatctataaaatgggtacaaaactgttgcctgtacatccccctacagggttattgtgaggacagagtgaacaatgttgagaaaggactttgacaaacatagaacctgagtacccaacagggtgctgtgggatgtagtgagggaacctcaccaaagcactggactgcaggaaaacttgatgaaaggactttatcctcttgggttttactaaaaatagagaccaggaaaaaaatgcaacctggtctcagtttgaagatcaagttatgaagatcttgtgaaaaatgttgctgatgcaaattatgtcaacctcattgcctgaaacaagcattccccctgcccttgaagctggcatgtaatcattgattttttgtgctttagagtcctacaaagtccactcacaatggcccttggggtcctgtggggcttttctgagacattaatacattaataccctccaggaacatctgttgagggccttctctgcctcaggagaattcatgcaaattctcttaattcgtgcaaaggtgaattaagtttaggtctttggcttcagtgggatagtctaggggtggaagagggagacagcgtgtagagatgcttactatacagtgtgatgaggacttggggctccctgggagcatttagcacaggtgggggatgcatctttggggatagggaggattctagcaaggaaggcttccaggccacctgaaacctaaggatgggtgcaagtcagcagctgaaagaggctttctggggacatgggtgatgattgtgccaggtaaagggaaccatgtgctgcatgtccagatgcctggcagtgagagagaaagcctggtatatttgcagggcctaggcctgtgggacccactagacctggaaccagactgacaaggtgactccccaccatgcttccctgtggccccaaagtcagtgtactaaagggttggaatctttgattccaggtaccctgtctcccagtatggccctgtgacctgagatctctctcactgaggcagcagagtgattcatattagagcagaagaggggatcagggctgcagaaagacaagatcccctccctgtgtgcctcatttgctgccaactacaggtatctgatgcctctgtggctccttccagaggggcatcttggtgcttcctccacaagggccctaacctctgttacatacaagtgtcctaaggatcacagaatcctaagaggtctcccttgaactacctgccatactctgaaccattctacatgtgttccatgcactctgcaaggaggctgattaaacattgaaatctcatcctcttaaatgtgcctctgatgttcttaggatatgaaccaaactccctgccttagtctgctgggtgagtgtgaggcccatgcagaaacctaggtgaggcagcgtggtatggtgtgggaccagcctcaagaccagttccagcatctccctgcatgtcctccagggctctccgctcaagccacattgcgcttccctcgatacccccatgtgccatgccacctctagctcatggcctttgcctgtgccgttccctcgacttggaatattttcatgcagcctctgactcgctttagttaatgtctattcctctttcaggtttcagcacaagtgtcatgtgcacagatccataggccaaagacatccagtgagttggcctgaactacatgacaatagaaagtaggctgctgcctttgagtgacaacagcctctcctgatgcttgtcgaaactgagtccatactgtgctggtgcctctcaggagcaggtacctgcttcatagaggaattaagggagatgacccccaagtcttcccccaggagtaaaagggcaccttggttcttttgtccttactacatctggcaagtccagctgtgtccctgaggtgggcagctcactccctgcaggaggcagtggggctcccctccctgtgccagctgtccatttgcagctcagaaaccttcgctgatgccagcaagggtggtgtttgcaaagagcaaccgtgtgctccttatttattgtgtggaaaagaaaacaaattaagctcttgtaattatacagtcagacatggccttaaataaagcttaagcagtcaaactccacttagaatattaataattgcctttcccagccctgatccccagcagctttctttctttgtactcctcccttcccttcccacccatctccactcttcttctcccccggctccctcattggtgcagacctctgcttggccctcagaaatctctggaagaccccctagcagtgactaggaagaccccttagcagtgactagtccctgttggacttttcacatatcactagtggcatttattaagtgatttcacagtcatggggttgtgctagaatattcttgtcctgcccccacctcccttattttggttaatccatgagaagttgcataatattatgattgaagacacaagttttgtatcagtcagaactgggctctgttcctaccttgtttgctgaccagctgcgagatcttggtcaagtcatctaatctttttgagctgactcttccctctggtaagaaaatcatctccctcataagcttgttttaagacttggatgacataatgcatttgaagttttggcacacagcaagtttcttacaaatattaggcctttcagttactatagctctagatcatacctcatatcagaattttatggagtttcttactttcatttttctggactcaaacatttattgatgtgcccagagcctgcaggtacgtattaggtctcccaaagcgtctgtgaagtgaaatggatgcatctgcttggggcctggcaggaggacatggagtcggggtggtcagtaataccatgtgatgtgttgttctgagggtccactgacatgcctcccctcacgactaatgaccagttctctgagcaatatgctatcttaaccattgtggctatagtgctttacataccacatctcaaaataccatcttatttaatatgctataataagatgaagtagctagcaattaccatcatccctgttttactagtgaggaatctgagagaatgcattgtccaagaccacacagctagaagtagtagagtaggagccgggacccaggtctcagactttttcaagttctagctctttttttgctatactgggctgtttcctatgctgctgccaacacctgggaggagactcatctggtttctggacctcagagtcgtgatgctgcttcaagacttagtgtgaatcagtcagtcaccaccttactgtctcttttagtttcctttcctgtgacatggaaaatgcacagcagcactggctttacttgtgatatgatatgtgatatgatggtagttgggtctttgccagaaactaacttgaaagtagtttggaaacactgaaagatggttaggttcaaaatctctattaggtgattatatggataataccataaagggccttgttcaatgcaggtaacaggtgctttggaaatgctggccacaggattcaggaaggacatgggtcttaagtttgtccttggaggaatttttgcagtattatataggaagaggggagaaaattcatggaatgtacatgtgtgcacatacaagcaagcaggaaacaaagtgaagagaaaaagagacgaaatatttattgtgttaagctctgtgttaggtgttcttccaacagtaatccatcttcttgttttatacatgaggactctggggctcagagaggttatgtaacgtgctcaaggtcacacagctactgaagagatttattcatatctataaatgtctggtccagagctcatgttctttctgttgtaactgatataaagaccaggtcacctctctgagggtggtcaggagtccaacgttcccaaatgaatatttaaaaattgtttcttcttgggagggaaactgatactaccatttttgcttactcaactcccagcctccatggttccgtccctgggggttcagcaccatggccagagcccagggagccctccctttcctcctgggcagtgaactatgaacagctccccagagagaagcgcccaggccctagtccccggctcaccttcccctagcattgccacagctgctagtgggctgacctatgtccttaagcgaatgccactgccttggcacaagcaaagagttaggtgcatgtggtggacaggtggcctgcgctctgtttgccagccctcctgctgggatctagacccagatgtaaacagtagagggagtgccccttccacttctgccttccagaggcccagtctagagtggacgaggattgtgatttatgactttgattaccctgcattgaggaattatctagggctgtaggattccaaaggatcctgagcaggaacaggattctttcttccagaccagagctcccagggtcaggtctgttctgttactgttgaatggggcctggagcaagtagatttgtcatgtgctttctcacaggaatagataaagtgggccaaatggtgagaaaagcacagcagagctggctgagttatgatgtgggtgggtttgtcccctaggatgatgtgattttttcattcttagaaggttttcacctgcatagtatagaaccaagtccccagctggagatcaagacaacttcttgctcatgcgcatgtgcacatacacacacacacacacactcaggtgaacacatgccaagtgtcatgacaagggtgtggattttggaattagacacgtggactcaggccctgtgataacactaccagcttcgtgaccttgaactagctatctcacctctgagccatggattattgaattgcttatctgtcaatgagagcaaatcattataataatacagaccataaaatgttgttgggaagattcagtggacaaatatctttaaagcgtatagtgattagctcctaacaaacacagagtaaacgttacttattattttgatttctcaggaaatgatttctgtatcccaattttctttagtttactctcatgattattggtaatgactatggaaaagtccttatagcaaggaaaaatgattagcaagttaattaattatttgcacttatgttcagatctcaagattttaaattaagttgaggtcagccatagcagtagtgcaggtctaagaaataatgagttgagtttggcaccctgttcaatgcaagacttaggaaaattgagccattcagtgaaatttacctgcatgcttttatttaacaatgattgtgatcaaggtgtaaatcattccttccactttgcacaaagaactacaagcagaaacacagttcacaagtcctaatgttagtgattattcctgagagtgccagcctttggccaggcccatgcatccacatgcccttttactctgttctgttcccgcttgtttctctaagtctcaatgcagattgcattgtctctatggcctcctcaactcagttcatattcaatcctcagctccttgagaatctacatggaaccaagtgggatgggggttgactctagggtccatatactcaatatgaggtaagaattcttatcttgtctcttccttgagtgagtctatgtgaacactaccagatctcttcaggagagaggccatggggtgtaggcatgaacactgcatttcccaaacattttgcagaattggacaagagaggccaaaagactgcatggtataaattacagaaaatggtggtgtaatgacactgttggtgaataaattaaagccctgaatcataaggccagtaacagagagggggcagagaagtgtaattaaaaggagaaaagagatgtttttagctgacactggaagtaagacagagatgggggcagggtggggagagagggcagctcagaagagaggacatgggtattgctggcagtcaaggaaggtaagaaatgaggccagtacttatgaaactaaggaggagagagggacaatgggggtaatcttagtgggaacaaaacaacatgggctttggcagtaaagatagctgtcagatgtactctgcagacacagaataagatgaatggaagagttctgatgaagacagatgagatcctggagaataaggagtaaaatcaggggttaactggatctccctggagtcacagcattctgaagattgttctccagtgtcacttgtatctgcagctggcctttcttgcaaatactctttgacttatcctttgtaggaatgagaagtaaaccaagacatctggggcaagagtgcctgtcttggaccaggtggcatgggtaaggctgtggccagcccggctgcagcccaccaccgtgtgggtccagcaaggggccaagaccgtggggaaaattcaaattctaagccagaagtaatcctttttggacaagagttcttccctggattcctctggaaatggagtaaatgaacaaatttctatggggagctgccttgttcaccccatacacccagtacacccacatttcccagcacagtataggtacctaattagtgttgaatgattgcatgagcagagatgacttttaagatagagaaaacaaaatgatgctaaagctgactctgtttatagcatttgctcctctcttttgttcactgctgtaaagtgacacctagatgcacggcatatagtaggatctcagtaaataacacattgtccaaagtgggacactttggagaatggaagggaaactgacctgatgaaattccaggataatagatgtgagctgggactgtttgggcagaccagaatgtgtggtcacctgtcactagtaattaatacaatgaattagtcttgtatccttggaactatctcaaaaagaatgaaggtcctgcctccttctggccacattacctccatttatgcttgggctcattcaataaacatctactaagcacctactctgtactaggtatcttgctaggcatcaagaagacaactagagggaaaagctgtcgttttactccaggattccctccattcaagaggcagctagacttttgagagatacatgatttgacattgctgagcttgatggatggatgaaatgctctgggagcatgtgagtggggaaaaccagtggtctggaggtggtggtcagggaaggcttctcagaggagggatatatcagtaagtcatggaagatgattaagaatttgccaggcattctgggagaagactgaatgtcaaggacaactgcccagggcacagggctcattatagatcagctcaacaacaccaggttgctggatgctgggaaatattgttgtgactaagacaaatgagccgttgacctcatagataatatgaattgcttgctaccagatattatatagtccattggggctgtgttgggggaatttctgtatgagttgggagcctggaggaggggcacctacccgacatggagtggtgtcatttctaggtgctgacattggcccctagggagagataggaggtagggagagagacatccagatactcaggtggactgggaagagaaggttttgtgtgcccttcttataccaagtgtatggggtgcctctcactcttttgcagctaatgttacctgggcaaacagagtggccacagtgctggaccaaggcagcaactgctcatgtacagacctagaaggtctagaggtctccctgatcctcctggaagtctgagaatgaggagggaaaggctgggtgggaggtactggaaaaaagagacaggaagctggagaaagaggaggaagctggggcgttgcatagataaagcccatctgcctccccatccaaagcaaaatgttcctcattattttccttggatgagtttgctatcctgatgatattaattattcttaaaggtcaacagcgctctttcgaatccccttctgttctatcatgtaatcagttaattaattggaaaccatttagcgcgtatgctgagtgcgttgtctggtgcgagttttcttgttttgttgctcctgcagtgatggttccctccatgctcctgttttctttcaaggatttggaaacttgagagtgggcccccttctcccctctccttctgctggctgatcccccgttcattcacagttggctttggaggtgttctctttagctttttcctttgtgagtccttactggcaatattaattcatttccattgagtgcctaccatgtggtgggcactgtgtggggcatccgtatgtgttatttcacttgattctcaccacctcatgtggtagagattttgctcccatttcagaagagaaaggagtgagactcagcctagagaaatgagctgttcatgagttgtctagctaaaatgtgtggctgagtaagaacagaaccttctggaagccttatatcctgatttgctgtggcgctggtgcttcagagtatctgggagaggagacttgggtcttgtgatagggttttatttagaattcttagtcccaggcattgctggtttattacaggagtgagcacttgaaatatgaagctggagctctgtcttccccatctttctttattgtgcttccattttgctcttccattttgctctgatgtacacagaggggattcctcagcagctggagggcagattagaagcaggaatgcattgcttgtggtaaaaaatccctgccagctcctgaatatgcccagccccccaggacgatgcagtcccaccaaaaggccgacctctgtgggactcatgagcagctcagcatgtttgttcagctgggatctcctgcccaaatccctcctggagaggggctctaggatgctccagccctgatttgtcactgtgtgatcactctacaagacctctccctgcctggagtatgtagctcatttctggttgacctctctccatgcctttccctatgctctcctccatgctagtggatgggtctccattttttatggctgtcacacatggtcccagttagtccagggaacacagtgaaaaattggactccaattcccctctcagtgaccagaacttcaagtctttccagacctgggggtgaggaaggctttccaaattttacctaagaatcgtaggatcctgtcctagtggtggtgacaggcagtgatcgctaggagcacaggagacagggccctagtaacgtagcccctcctgctaatgctagcaggtagtaaagggcacagactctgcatccagactgctggggttcaatccctggcttcccccacacagcagctactgacccagggcaagttgtctaactcacttgctctgtaatctcctctctgtaaaacagagatgatgataatgatgatagtagcatatctctcatagggttgttgcaatatttaagtgaactcttatatgcaaaacccttaaagatagctggccaagagcaatcaccatgtttgttagctgctattactattaccacctcaaatacctctgtgaccccagcagccatgcattgagtacctgctatgtgctaagcactgtgttgggcatttgacatgcattaatttatcttgatctttagaattgccccataaggctgatattattaggacttgcatggtcaagatgaagaatctgaggtccagagagattaaataactttctcagggcaggtcccacaactcaggagggtcagagctgacagcttagcccatcttcgaaaaccattgcctacctctcccctaaatgcttttccaaacccacacagccactgttcccttccagagtagtgtgctaaggaaagaatgagcttctccatcatacacttggatggggctttctccactgtcagttgcccattgacttggtcctaaaagtgggtctgctaccttgttcctcacgtgatccccagggttgagtcttctggacacccctaggggagaaggcccctaaaggccaatggtgtgctcacatgtcctcctggaccctgctagaagtggggcagaggaagtccagctatggctttttacatgcgcaggatctactctggaaaaggggcagggcaggaggtctgagctgtcagcaaagcccccactcttctgcgctggccactccagagagcagccttagtgaaccctttgacgctagccgctgactctgccccaagcctctaggacactacctcaggcactaagctaaggtctctgcttcttagctcatcctgtagcctcaagggctccccatcctcaggcaaccaggggtatgggtccctcagtgggcctaggcacagctgtgactccttgagtgtggctctggctggcctgttgctacgtgctcgtctcttccctctctctgctcagcagcacccccttgaccatggctggggcgcccctccttcctctgggttccccagctccagctttgggtctcactcattggtttggatgctctcgtccgagtcctgttttctcctctgctctcttttgggaccatctccactcatcccgggaccctcactgcccctctcactttctctggtttctagcctctgtcgtcctctaggctcaccaggcatgaagttcaagcaatgtgtgtgtgtgtgtgtgtgtgtgtgtgtgtgtgtgtgtgtgtgtgtgtgtaggaggctgggtggggtggggaggcacagattcatcttgtaattgagtgcaggaagcaggtgtaggaggcactttgggcagcagggacctccctttagtcaatgtgcagtgctgtgatggccctgccctggaccagccaggggcacgtccccattggagattctccatcaagttccaggaggggattgtgaattcccctatgtggttattaacaatggcatttgttcccaggagcctgcacaggcatccctcggctccctgacagggcatctcttttcatctgctcacatgactctttcatttccttatatgtgcatatacgattgtctacttctttagggcagagggatttgattggagccaaagtcaacttgcccatggggaaaacaaaatttcaccagatcagtggttcttaaagtgtggttcccaaaccagcaacatcaatgtcacccagggaacctcttagaaaagcaaattctccaggcctgctgaatcagaaactcaggaggcctggtaatttggtttttccaagcctccaggtgattctgatacccggaatgggagaacctctcccctcaatgctttctcaaatccacacttggcttgtgttccctctaacctcttatcttggaggagggattggatgcagcgttggcctaatcagatttctttatgaaaaggcccagagcagctttctgttcacagttttgttgtttttaagagagtcatagattttcctttaatctgaatagtagctcttagaaaggggactgttgtctggcctggctaaaaagtaatgaacaggaatgtgcttcctcagagcagcttagcactcttgcccctgcaggctcccaccagcctttggggaccctggcttctccagccctgacagtgcccgccctgggcagctctctctcagcccgggggcttggcctgcagctgtacctctgttcccttctccctctctatcccttgctttgcttttagtcagtagctgcaaggggttcttgatttttcccacagatgctttctgcgtctttttttttctcttgtcatgacagctcttgagtaaaaatgagtgtgatgtcttgggcacatcagcacatcatgtgctggcgcctctctggggtagtcagctcccacgccaggcctggcctccacctccccgggtggtggatcccgggtgaaaaggcccagcatctgcctggcagcgcccacctgggactccagagagagctcacatgcttcagggtaattagccttaggttaatttatctgaaaagaaactcccaaggagcaatgcccacccaccccgcagaatagtttcaataacactcaaggtctggtgcaaagcagacaacatgaagaaacacagcagattttaaggcctttggtggccttgtgctgcagcggagacccagatgcaggtggccaatagacctcagggtgaggaccgcattttccctggacctcaggccctgcccaggcatctgctaggtgggctgcaggaggcagcacaccagcaccagcccaaccctaggggagcaggtgctgcctgctgtcttgttacagcaggtctctatattgccttgtgaactcagactttactgaatacaatgatgcctgaattcaaggggtcaccacctggacctcctgtatttgttttaatggcgtgggcgcgttgtggcttcggtggtgactggcaatgggcagaaacagtgacagagcatgttcactgagtgcccactgaggatgaggcactgtgtcagctgccgtccataccccatttaatcctcaccacagctcaagtggacatgccctattattattcccaacttccagatgagcaaactgaggtacagagaggtgaagtaactcacgcagagtcacagggcatggaggcagcagtggtaggaccggcacccgggcccgtgaggtgccaaaggccatgaccttacccatcctgcaacactaaggatcagaagtcactcctgtagccaagattggccaagaggggaggatccctcagctgccctggtttgagtatcaggaaccctggtgccagctaccagcctctgctaccatccagctgggtcatcttgggaactggcttaacctctgggatccccattttcctctcccgtagtcagaatccaggactccgggtcctggctccaacagtgacttgcctggtgacacaaacaagttatctcctctcccaagtcctcctggatctcacagtctcggcgtccctcgtgtaggccaagggaggtgggctgagggctccccactgttcccccatgttctgcgaggttctgagtgtgctcctcagcgcagagacgtgaaggtttgtgctgacaccgagaaaagcatgcctactggagggaacagggaagggctgctggctctgggacctgggctcacagagtcagctcctggtcctgctcggctccacacgtgttcccatcaagaggccagggcaggatgggccctgccgaggcagcacagaccagaagggacggggatcctgaagggcagaaacccaaatgtccttgagaggcagggaggggtcaaagaggcagagctcctcagaccccctaagaagagttctcagtgtgtttcttggtggagccagacggagacagctgtggggataagtgtgtatgtttgaatatgtgtgcgtggtatggtgtgtagtgtggtgtgtgtgtgtgagagagggaagaagagggagcgagagcgccttcatcctcttgacacccactgggagagtctggcttggctgcgcaatggctgtgtgagttcatagcagtgtagaagttggcttcacagggacagaaagaggtcccaggacaggtgggtggaggagggcagtgggaggagcagaagccgcaccctgcagggtacaggattgtctttgtccctaggcctttttctgctgaggtctctgcagagtctctttgtgcactgtggttgctgtgtagaaagaaatgcttccttccagtgtccctagaaactcaggttggttttaggtcccttcagatgaaagagttttgtgggtcttccgttgaactttccatacgttctttgagcacttactgggttccaggtgctataaagaaaataaaactgaaaaagaaaaggttgtcttcaagaaaagcaacctggtgggaggccaacacaggcacagctgtcactccaggccagcagtctgagacgcaggctgtgacagtcgaggcccaagaaaaatgcagtgggagaaagcggagggaaagaagattttagagtgggtggtgctagccgtctgcagagagaaccactcacactgtgcttgcagggtggggagaagggcatgaaaggtgcggtggtgtggagcaggagaagtgccagggagctagctctaagggtgcagccaacagggcgatgccattttgtcccaggtaggtttttagggttagctagggggaggggctgaaggatgggggaaggaggtgggtagtgagagaatatatggaaacaggaggctgatgtcattttgtggaagtacttgaattctgaggtggagtttggacttgattaggtgggccaagcattctggaagagtccagttctctgtgtccatatctggtctcccatgtgccacggtccttctccacctcctcagcacatggcaagtgctcacctctcttttccttcctgctctgagctccagcctgagaggatgctggcagctactcagtgatgttgcactgtgctctgggacaactggagtgatttccttctcataaaacaaactatgtgactgctggattctgggatggattgacatctggggaaagaaaacctgacattcctttggagaacttataatgacagttttctacctgttgactgcttctctctactggggacttcaggcaatgtctggatttttcagatggtccagagccgtgtcttctaatatggtagcctttggccactcatggctatcaagcacttgcaatgtggccaattcaaattgagatgagctctgagagtgaagcacatatggatttaaagacttagtacaaaaaagaatgtgaaatacctcatttatatagatagatagatagatagatagatagatagatagatagatagatgatagattacaagttgaattgatgttttggatatattgggttaagtaacatattgttgcaattactttcacctcttttcactctttaacatgtgactaacagaaaatttcacgtggtatttgtgtcttttattatatctatactggagagtactgttctagacaaggggttgtcacactttttctgaaaagggtcacatagtaaatattttggtctctgttgcaattgctcacctctgcttttgtaatgtgaaagtggccctattagttgctcattgctgttgtaacaaattaacacaaagtttgtgacgtaatacaacacaaatttattgccttacacccagaaattcaacatgggtctcatcaggctacagtcaaagtgtagggaggtcagcatttctttctggaggctctaagggagaatggatgaatgggttttcttgcctcttccagcttctagaggtcactcacattcttggcttgtggccccctcttccatcttcaaagccagcaacattgaatgtctttgtgctttccttcattagtcacatgggtccctactttctctctgccttcctcttctacctttaatgccccttatgattaccttgggaccatgggataattcatgataacttcctgatctcaaggtctatatgcttaatcacctctgcggtgtaagttaacctattcacagattctcgagatttggatgtggataccattattctgcctggaacatgaccgtagacaacacataatcaaatggacatggctgtgttttggtagaactataaaaacagactgccgacctacaggctctagcttgctgacccctggcttagagaacatttctctaaggatgttatgtgggtattttttggctagacactccatggagaagattctatgctccagtaagtttgagagacacagtttgccaggtccttctcttacagtaaaagctctgagaagttctgcagtaaataagcatgcttaattttaatacaattttcaagcaatatgatctttttccccttgaaatacccatgaacatattgcagacctcagattccaggaacacgctctgggaaaccctggtagagcccataacaggctgcacagaaaaagttgcctccagtctcctgagctaaggtcaagacaccagtcacgtcagttgagatttgattagagaaagcattttgacttcattaaagttcattaaatgagccatccagtgtaatttaactgaataaaaatggctcagatggctttaaaccccaccccattttacagcaatttaattgagggaaaagcaaatatatcaatgatgtaggaaaatatttcttggccttcaagaagaatgttgggcggcagcagttgcttccttgtcataggcattagattttaaggggttggctcatgggccctccttggtgctggcagcaggccttggtgacaagattatatggtgcctccttccttcccactgcttcaacccaaggaggctggcggcagccccctaacagctcctttggtggtaggctgcagatacctctggtgtggagctgatggtgcacagaagtagtcacagggtcaagactgaggaggtgtaggttccctggctcttggagaagtgggcagtaggctgctagtttcatccttctgtggtttgttcttttttttttttttttttgcaaagtctatgtgggcttggtgctgcatcagggaattctcttttcttgcagattcttaattagttctggtctagaacagcactcttttcttgcagattcttcagcaaaatcaaaagaatcctggtatggtgtgtcatgagaagggcctgatggtctccaagatgattgctatgatctgaatatttatgtgcccccaaaattcgtatatcgaagtcctccccttccagatgatggtattaggaggcagggcctttgggaggtgattagatcatgggggcagagccctcatgaatgagattagtgctctataaaagaggcccccgagagctagctagccccttctaccatgtgagatttaaatgagaagacatctgtctctgaggaggtggatccttgaatctgctgccccattgatcttggacctcttaacctctagaactaagaaataaattcctattgtttataagccacccagtatatggtattttgttatagcaccatgaatggattacagcaaaaaccaaggagatatctctttcatagtgaaaaaaaagaggctgggcacagtggcttacacctgtaatcccagcactttgggaggccgaggcaggtggatcacctgaggtcaggagtttgagaccagcctgaccaacatggagaaaccgcatgtatttttagtgtctactaaaaatacaaaaaattagctgggagtggtggcacatgcctttaatcccagctactcgggaggcgtaggcagaagaatcgcttcaacccgggaggcggaggttgcagtgagtcgagatcatgccattgcactccagcctgggcaacaagagtgaaactccatctcaaaaaaaataaaaaacaaaaaataaagaagaaaagggatagatacttgatgatgttagatcttaagaaagagggaattgcacctttcaaaatgctgtctttgtggatgaaagaaataagatttgcaccataatgattgcagccagcaagtcacagaccctgggagcttgcaggattgggaggggttggacattcattgttttctggttagctgtgctggatgcaccaagaccaaacggtgctcaaaagagtgcctttctgcaagcagcagaatgaatcctccaggaagagtcagtgactgtggcatttatgtctgggatgcaaactgagtatgcccctggttgtctgttatctcttttaataatctttttgcaggaggaggctggagtacacccagggggtgggcaagtgggcagataccagattagatcttagtggctggaacctgattgggaggctggttccctggagccaccaagcatagacagagcaagggggtgacagaaaaccatgacttggaggctttcagggatcacagtgaggcagccaacttggccgttaaggcctcagggcaaatgaggggccgagaacaggtgtattaatttgcaattgctgctagaactcaatgccacagtctgggtgggttaaacaacataaatttatttcctcacagttctggaggctagaagcctaagatcaaagtgtcattggcagggctcatttcttctgaggcttctctccttgacttgtagatggccattttctcctccctgtgactttacatcttttctttatgtctgtgtcctaattctcttcttataaggacactagtcatattggattaaggaccacccatatgtccttacttaactttaattaggtctttaaaaatcccatctccaaatacagacacaatgggggttaggattttgtttgtttgttttgttttgttttgttttgagatggagtttcactcttgttgcccaggctggagtgcaatggcgcaatctcagctcactgcaacttccacctcctgggttcaagcgattctcctgtctcagtctcccaagtagctgggattacaggcgcccaccaccacacccagctaatttttggatttttagtagagatgaggtttcaccatgttggccaggctggtctcaaactgctgacatcaggtgatccacctgcctcagcctcccaaagtgctgggattacaggtgtgagccacggcgcccggctgggtaaggattttaaaaacgaattttgaaggaatgaaattcagtacattacaacagaaaacactcaagtgagagggaccaaggaggtgtggaggtggagtgagcatccaggagctggagtgggagtacacaggtgaggcagtctggtttaatagctcagagacgcagaggacctgccaccagcaatcccttacacatgcaaatcctaagacatacctgcccattagcctgcctctaccagtagaagaggaggtgcttccaaatgtcagcccaactcttaatccaggaaatccacaaatccttccatcttcaggaccactttttggatggggcttaatgtctcctcaactctcaacccccaaaggggcaacagagggactcatctggttggtttctcttggcaacagggtccgtcttattgacccttttgtaacagtaggtttcccagggtagaagatgaaatcctccccatttgtgggctctattcctgccatacttgggtgccaccattaggaaggtcataggactgcttactgtgcttaggtttctactggtcagaggagaggttgcctgggaggacccctgttcattatggggttaatgccagaggtgacatctcagctctgtcgttcctcagggcccagggttcagccatctgtgtgtctggctccttgttcccggagcacccagtagccacatcatcattgtttactacctctggaccccagagtctggtctgtgagagggccagttttgcagcacaaaattaatggctttgtttggtagtctcaggcgagagatagaaggggcagtgtcacggaacttgattttgcggaagagtttgatgcatcatctcgtaaaatcttgctcaccaaattaattcaatggtcagatggcttggaaactggccattgacccaagcaaaagtcagagacgggtgataatggatctattagggaggaggcccacagaaaaggctgccgtggggctcagaggcagggtgttcttaattaaactcttgtctgatgagcagggtaaccagctcatcaataattgatgacaggtgcatataggtgaggccccagctagaaggaaaaatcaggggcaatgagttccgagtgggtggcaactcatacagaagcttgtttatttaccctgcgctatgagaatttatcaatgccggtgagggcagggtggccagaggcatgctctgcttgttttgtggtgtgtatatgtttgccttatctcttgtctttttgtataagtttttttctggggcttggtgcttctactgtgtgtctggcagggcattgtgtacagttgcaagggttgtgcacactgcaaccctccctgaacttgtgcaatacagtttccaggctctgcaaacaggcactgggttgtctgtgtctgtgggcagatcacatgagtgcttcagccattccatccacccaaagagcgggaggaatccaggtggggcttgatgggtgggggaggggcaagggggagatgaagccaaggcagccctgggagagtaggagcccacttcccccttaacaggtgtcccaggacccctccttcctctgacttgtaataaggcaataatgctatttcttagtctttatttgcccagaatgtctgttattttctttctttcagaatccaattttcttttgacatttctgcctaatgtagcaaagcatgacctttgtgagaggacatcgctggcagcctgctctctgcctcgggttccccaggactcctggcaggctccctgcctgctcctccctctgagatgggcagggctgcccatttcacctggactgctcctgtctcctggcctgctagttcccaccagttgcttttgtaccttaccaggggcatgttcttcagggctcaataagtctgagctttctggctaccaactgcccattggatgcagctgctcagcttcagaaccatgggttttgttcagggaggcactggagaggggtagggagctaaaggcaggggacggacatcttcccaaagtgccgcagggattacctcatggatttggaagctgggggcttgtccagcttttgctgccgtgatgctgttgtgcatagagtaaaccaggcaaaatagagcaaaacagaagatttctacctagatgaatcaaacacttagatttaataaaacctcataaaggccagtggcaatggagactcagagcagtaccaaatcctgttgtcctgaaccccaagttcgaactcctggtctaatagggtgtggttagtgactcagtgggagtgtgtgtctggtctccagctccacccttctgagcaggagctgggctgctgcatggggctttgccccaggtggtgtcctcaggtggtcatcactgcagttcttcttttatcacacctttctgatcggtgggggaacagtggaagtttgtaggaataagctgtatagtcattaggggttttgtggagctgagcatgatggatggcttaggtgtataggcttttagtgagcatgtgctgtcataccagaggtctcagccttgcagagaggcggttggtgacagtgtagggccatggggactatcctagaggcttaaaaactctgaacagagagggtactgggtacagggaagacagcagaacagtaaacttgggagacatctacctatgtttctttcccttctcctccagtaccctgcacccccagcatgaggctgcctcctctgcacagtcatgggccatctcagggacctagccagttcaggctggggtggaaccaagccactgcaccaaagagggctgcgtccaatgagaagggaaagccatgtccctttggttgttcttgtattttagtgtctggtactgttatgaactgggtggactccctccctatgtgatcttacccagccccaacctctcccatgagctctagacccaggaatccagcaggcaatttgacttatctctttggatagctaacagtgtgtcaaacttcatatttgcaaggggaaggtctctatcccatcgcctccatgtgatcctttggcaggctttctcgttctactcaatgatgtcaccatttacctggccactcacttctctttctctcctctccaaaatccaatccaatagaaatcctggcagctctacctctaacacctatcttgaatccatccacttgattatctccactcccttctcttggttggaagactgtagcagcttcctagctggcctgccaacttccagtcttggtcttctattttttaaaatggtaattagactaggtcacttctctgctgagaaccatccagtgccttcccaccactctttaatatcaaatccaaactcctccccatggccagcaagtgtggcgtgaatgcctctcccccttatcccaaagcactcctcactacttcctgactggcttccttcctggtcctctggatctctcaggccttgacacttgctactttcactgcctgaaacactcctcccttggtactcagctctttcttcttcttggctcaggcctgatgctaccttctcagaaggcacctctctctgagccctccgcactcctgtatcagttacttacatcacggtgttgatactcttccttctgcttattcatctgtaacttgaatataagattccagagggaacttcccttccccctcaatggtcaactccctcattcgtcagtgtagcctcaataaatatttgttgtagaagtcatccaaatataggtgcgtgtgtaagcatatgtgtgtgtataaacaagagtctgtgtttgcctttagtacctacatgtttaatagacacaagtatacacacatcgtgtttgtgtggatagatatttacctaaatggaatcagcactgccatttgttcccatcagtagatgagtacattgttcctgggatgccacttcaattctagcagtgtctaactgctgcctttaagggctgttatcacatcaaaagttgtttgttgagcctggcaaagtaataaccgtgggcgtgtttcttcttttatccagaagactaatggctgctcctttcccctgtacatcctaatgagaacaattaaatagccattaggaggagaacagacgtgtgaacaaaaggctgatgtcttgatcattggtgggcatgtttgctgggagagacactggctaaaaggaattgtaggtgacctgcagagttttttgacctgtgtgcgtgttaagaatgctagtgggcttatctactctgagaactccctgtcctcttagagaaggatggcttcataaaggctctgtaaacttttattgtggggaggggatatggaagaatgaccatgagaatttcatggtttctttgatttgtaaaatcttgccctttaaaaggcctcaaaagcctatccaaacctgatctatgccctcagctattagcagatgtatcgctagcctaacagcatgaagaagaagaagaagaagaagaagaagaagaagaagaagaagaaggaaaacaaagccaggctccagtgaaatgattaagcttactacctagagcattatttgtgccagacttgttttaaaatttccctttatttgtcaatcttgcagaaacctgtcaagtaaccggctcaccacactctcgtggcagctcttccagacgctgagtcttcgggaattgtaagtttggttttgaagactgtccaggtactgaagtgctggtaatgggtggatggggaggagtgtcaagcagtggaaccacctgaaggctgagcatacatctactcgaagagcctacttgggttggttgacacagagtgtaccatgttcagtgagagcaattaacccttttgcttgacttcggatgctctttctgggcacaatctatttcagaagacaggagtctcttcttttattatgacttagttttgtgatctgtagataattagttataatagtataaatacttataataaagaatttataataaatcacattcataatatataactttatagactattaggcatgctttcatttatataactttagatttatcatcataagagtcataagaggtagatattattattctctgcattttatgggtgaggattctgaggcttagaaagacacgtgagactcaactaagatcacatttctagggcctagccaagctgggacttgaacccacaccttttgacttcaagttacatgtcttttcaccactcataatcttcttcagcttatttgacttgagtactggcatgtcaaggggtttggggaggccatatattttttcaatctgcatgtggactgcttagctttgctgtggtccaaggctgatcagggcacccctatcccagccagccattctgcacaaacaaaggaaggccaaatgagtgaacattcgtgaccactgctggaaaaaataactcatgttgatgagtgattcatcggggtcatctctgtgcatgaaggacatcatattatgttgagggtataaatcaaggaataaattgaaaaggaattgaggcatggatcaagttagggagtcagggttccagagacaccgctcatgtgttccctcttacttggtgacgcagatccaaattcactgaatgctgattgctttactctctttaccaagaggcaatgaccttggacctctgcctatgctgttggcctttcaacttgttttcccttcacctagcaagacctgacttcatggatgcatcaaaaccttaccttttcagacccagctcttgatgctttacatcaagcatcccagtagcctatcaccccatgatgaccttgtgtactgtaggtggaaaaggtaaattaacatgactactacgatttactactaacactgatttctgagttcttcctctgtgccaggcattgtgccaagcaatctcttaagttgtatacttaatttaatttaatccttatggcaattccttaaggtaggaattattactatcacttcactttggaggacactgagatgcttagcaaggttaagtatactgtttaaggtcactcactgaatagtggcagtgtgtggacccaaagctttgaccactgtgctcaactatctcccagtgttttcagtctgtttccaacacaaggatctattctaccataattttaaaaaaaacacatgattgtggtctttcttaagttaccctagaactgactgagggccttgggggatctctttcttgggtgtcttgcatgtaattattctggaacccgtagtcccttcatctcaggaggccagggatggcatctctccaggggacatagggggtctgctgttggctgaattattgagaaaatgttcagtgctctttctaaaaaattattggatgtgaaatcaatggtgtgctgctgccctggtgacctgttacgtggagttttagaaacagttgttccgtggatatatatttaaagaaaatgtcagatttctcccagaggatcatgggattctgcattcatctttgcctgggatcaatacaccagtgagttagatgtgacttatggaggaatgaagacattccctccagtgtgagtcagtgtgtgagtaccaccatgtccatggtgtgttttatttctgtcatattgttaactaagaaaaaaatcatattggagaataaagaagcccccctctaaggagcaatcaccctggtaggggtctattttttgaagaagaattgaatcttgggagaggaaaattcatcttttggctggaggggccgcgtgttggctcttagctgtggttatgattaaaatccaaacaatcccagttcctggcaaatggaagagggggtagtattttcttgtctgacttccttattagtccacatggcgccatctgccatgagccatctagactgccagggtctgctcgatggagcctgtgggctggggcgtggggatgggttgtgtatttccaggaagaaagaattttggccctggaggagaaagggctcagtgtgttgtggagccaggaaagccacaggccagaagtgtgaggtttaagtgaccctctgcagggacagaaggggcagagggtgtgcagcaattccttaacatgtttctttctgtcactaaggacctctgctgtaccccaaccagcccctcgcccagtagaggatccttgctgtaagaatggaagggctgagtgtccatgacttttccagtagggcagaaggagaaggaagaggcacatcttgagcatctaatgtgtgtgaggttctgtcttatccttggaacaatcctacagggaggtagcagtgtgaccagtgttacaaatgagggatttgaggctcggctaagttaaacaggtagttcaagatcacatggctagtaagtggtatatctgggaatgagtgttatgatgtttaatattatcactaccccgatctgctgtttccaaagaccaggctgtttctcttacctgactcaagcaacacaccctacatgctcggcctctccttccagaagcccctctcaagatgtcgggtcccttgagtggaatcaaaggaaaaaaaaacaaacaagttaccatctcagagttcctgcagtgcaccaagacccttcctctactttctctcatttatttttgtgggatgagggagatggtcttggccaagcccctgactcacagcttcccctctgtccaggggggcgtacctcttattgagtgaatttgaagcatcttcgcatcttccatgacttgcattggagtaaccagcacagtttcaatggcacaggttggaaaaatttgacgtggcattgtgcagtgctctcagaagtttctggttatggcaagattattttttttttccttgcagagaagatgagacctgtctgtccaaaaatcagagcaggaatcagagagattgtcttagagataaagaatgaagtaggaagaaaagaagcttagattctgaatctcaagatacaatttaggcaatgggaagaggtctcagaggatgtagacctacagcacagaaacactccagcagtgccctaaggatccttaatgtatcttgaacaggcttctctgaataccctgcatgcatggagcagacatgattaaaatagattggagtatttcattttcttttaaaggaaagtgataattacctctagtatcatttgaagatttaatcagcttggtaaaatattaactcagtagcggggatgggtttgggctggtcctggtgcatttctcttcccagtcttggccgtgatgactttctaccgttcttggagacgtcactaaacaataatgttactaatagtattactatagtgatcatttctggcctcttaatagcttctttttgttcccaaatcatgctaacatatattatcatgaatcctcctaataaatttgtgaagaaggaaggtcaagcacaatgatctccattttgctggtgttaaaagagaaccttagagagttaagttattagctgtattcatttcctaggctgcgttaacaaattaccacacacttggtggcttaaaacaatagaacattattgtttcaccattctggaggccagaagtttgaaataagggagttggcagggccacactcccttcaaaggctctgcgggagaacccgtccttgcctcctccagcttctggtggctcctggtgtttcttggcttgtggcagcatcacttcaacctctgactccatctcacgtgcctgccatccctgtctctttgtctttaatctccaccttctttctttttctatttcattttatatttttgagacagtctcactctgtagcccaggctagagtgcagaggcatgatcttggctcactgcaacctccgcctcccaggtccaagtgattctcctgcctcagcctcccaagtagctggaattacaggcgagcaccaccatgcccagttaatttttttttttttgtatttttagtagagatggggtttcaccatgctagctaagctggtctcgaactcctggcctcaagtgatctgcccgccttggccccccaaaatgttgagattacagacatgagccactgcgcctagtatttcttttttaagggtaccagttattggatttaaggcccacctgaaatcgagagtgatcttatcccttgatccttaacttgattacatctgccaagactctatttccaaattaggtcacattcacagatactagggtttggacttggatatatcttttgggaggactcaactaaacccagtgtattcacttgaaatgatacagctgtcccaactcagatctttggtttgtgtgcttttcctaccatctgactgttgttatctcaaggaggcctgtgctgatggctccatcctttggggatccttttctgggtgacagcagggctgtcctggctgatctgggtcccctcctcattttccactgcctggccccaggactgtcactggaagtgttgatgctgtgcagggaagaagaaaaccactagagtgatgaccggagggaatcagtgttttctaaatatccagtggtggccttggctgtgctgcaaagtgcctgtccttacaaactcagatggggctgagttaatatgtggggagccatcagagccctgcgattaggccccaggccatcttggggcaagtgccgggtgttggtaagctttgccttgcagcagctgctgctgtattattaatgcgactgcctgcattattcatgaagcatggaaagccatgctttaggttccgcaggactgcccccaaagtcctggctaaaggctcccctgcttgagatctggttcaatgggaggagggacacaggatggacagcatcatttagatttaggatgtgccggtctttgcttcttgcccacctcaccatttgaatcctctcttgtccggatataaagacgattgtggatttgctcagtgggctgtctagggtgtcattgttttaagactcaaaatgttttctgctgtgtgtgtgtcttgttctcttggaggaaagtccagaaggatggggggaataccccacagttcttttgcagtttcccataaactcagttggaacaaaggaccaggtttcaaggtgcatcccatctgctggatcaggtcctgtaagcaggaccctggggggaaaggatggaaggaagcagaaaatttgtacaaagcctttgcctggcagcatccttggcacatcccaaacatctcacctaattctctggccagcctcaggacattctcatgctgtctgcctttggggggccatgagatgctgggatgtgcagcagtgcagggaccagacaggaggcagcacagcatcaagtgctgtgtggcttgcggcaatgcagccaagcccctcgcctgtctagtcttttccacccaggtggataatttgtatttttacacctacttaataatgaatgactgcatcttgtcaagtgagcagctgggaaaaccaggctgacctggttcagttcacatatattcaagcatctggaccctccttgtcattctagcagggtggccaggcctctccttgcagcccctgcagtgtgagcccacactgctccacctcctctggcctatctttcctgcatacactgggcagctcatctggccttctgctcttcttgtcatgagggttacgtgaagaaatgcgtggaagacatttagtctagtgttggcactacggcaagtgcgatgctaatattatgatcctataatgtctattatgttcgtctcattttttcctgtctaccttttctcttttctgtgtctcatgtccagctacacagacatcttgacataaccccaaggcaacacctccaaggcttcttgacttgatccttccctttccccttctaggaccttggtctgtccctccccagcctcacccccatcccaacctcattcgtaatgtgtcctctcttcctttctgctggttcttttctttctcttctgttttcaaccaaagacagttctccctgccgttgatttcctgtctcttggagcttaaaatcttggggtcatcttttgctttttcctcttcttttatcccctacaaagcaccacgtaccattttgccttccttgtgatgttaactggatcttctcttccctctctccagtttttcccactccactctaggcccatattaactaggcagcagttctcaagtggtggtccagggtgtcctgggggggccctaagaccttttcaggagacaatgaaatagaatctgttttcatagtaacactgagccattatttgcctttttcactctcatcctctcatgagcataccgtggagttttccagaggccacaggacgtgataacatcattgctctgatgatgcatggagtttgtgctaatgtattctggagttttacatctttctcagtgttaatttctaattggtagatactgatagatatgactcacataaacaacagctctttgaggccgtcagtagttttgtttgagagtgaatggagttctgaaaccaaaagtttgagaattgacctggaccctgccagtctatatggtgcctatgtgtgagttagaaaagatgccccatctgggtgcatgtagccacgtgccagggttacagctgggtctggccaagagtgtacagagtggattttatcctctgtctatccctttggttgagtactttgagaaatgctcaaactacacaactgtacgtgttgaccctgtgtttataagcaatcttaaccagcttctcaatctctagttttcctcctctccagcttatcctatacactattgttggatttctctttttacagacctctttgttcacattgttctccagttctagaggcctcaatggttttccctgcctcctggatgaattccaaatttcctgatgtggcagtaaaagtcctctcttatctggcttccactcgcccttccagctttgtttcccagcactccttgacacattttctgtcctgctaagcctttcttttctgttttcacacctcacctacaacttccctttgcctttgttacttccttctacttacccccaccccccacactccccccctcccaccccaacatggtctttgcctatatgagctcctgaagtcagggctcctagcttgctcctctctgcttctctcttgcacccagcaatgccttgcacatgacagatggggtggagagtgcatgagttttgaagtccagcacactgaggtttgaaactgtgctgtcttgcacaccagccaaagaccttgcacatgtgacttaacccctccaaacatcagagagggcccctccctccttgcagttctgaccatctcccagggttgtcgtaagaagcaaatgctcagtaagggttagttctttcccttcacctttctgacagagtaccatgtgcagagagtacttttaggctaagaggatgataccacataggggtatttgcacattctgcctccggtgtcctagtaactagaaagcactgattcttttccccaggagcctcacgttttcctgaaagctgattaattttgatgcatgcttaactattttggagttttccagttgtcaaaaatatcctaggtcttagtgcggtgtgcccaagtgcccctccctctggtttccaacagattcatctccttgatggtccagaaagagaatcatgtttcctctaatgatccaggcattcagatttatccggtgccctttactctgagttttggattgattaatgctgttcattgtctccttaataatcccattgagaggggaggtgacttgcttcaagtcataaggaaaatcagtagagaaggaagtccttgaaggtgactcttcccctatcaaacattcttcttcaccaggctgagtgctcctggaggacagggactgtcttcttcatctctgtgtcagcagcactcagcccatggccaattatggagcaggtgcttattaagaatttattgaatttatgaaagaataaagctggtcccaggatgggctttgagcatatcttggaaatagataaccacctactcccccagggacagtcagtcagtctcgttctctctttttctctctttcctttaacaagaatttatatgccaggctcagttctaggttagggaatgaacaaaacaggcaatgttgctgacctcaatggagtttaatttttattcagggagacagataaacaaactaattaaaaataaatatttaaagtgatgccagtagtgataaattctagaaagacaaatatagcatggcaagggactgggcagtgttagactgagagagccagccttgtagagatgttgggtaagagcttggcaggcagtggaaacagcaagtgcaaaggtcctggggtaggaacaaaccagtcaacaggtgaccttgcagacaccaaggtcagtgtggctgaagaggaggagggagtgagggaagatgaggtcagagatgatggagaatggtgcagattatttagggctttgactttgattttcaatgagatggaaggccattggagggttttaagaagaggagcatctcgagctgatatctctctcttttttcttttttcttgagacagagtcttgctctgtcgcccaggctggagtgcagtggtgcaatctcggctcactgcaagctctgcctcctgggttcacgccattctcccgcctcagcctcctgagtagctgggactacaggtgcccaccaccacgcccggctaattttttgtttttgtatttttagtagagatgggggtttcacagtgttaatccggatggtctcgatctcctgaccttgtgatcctcccacctcggcctcccaaagttctgggattacaggtgtgagccaccacgcccggccgctgatatctctttaaaaggatctcttagacagttgcatgaagtgaggtggatttctttattttttatttttgagacggaatctcgctctgttgccaggctggagtgcagtggtgtgatctcagttcactgcaacctccatctcctgggttcaagcgattctcctgcctcagcctcccgagtagctgggactacaggcgtgcgccaccacgcacggctaatttttgtatttttagtagagacggggtttcaccatgttggtcaggatggtctcaatctcttgacctcatgatctacctgtcttgacctcccaaagtgctgggattacaggcatgagccaccgcacctggctggatttctttttttaaaaaaatgagtttattgttttaaaactgcaatttatggacttacaaggatttttccacttcttttgtaaccttgttaaatcccttctccccttaatccctgaacaggtcgggtcccccttgtcctcatagccctgggagggtcctgggccatcttcggttcagaggttcccttcccctctctctttgccgacaggcagttggagcagaactttttcaactgcagctgtgacatccgctggatgcagctctggcaggagcagggggaggccaagctcaacagccagaacctctactgcatcaacgctgatggctcccagcttcctctcttccgcatgaacatcagtcagtgtggtgagtgagtggccgcctggcccagctggctccagggaggcatccctcagacaccagagatggtgctggacgttaccttgggatgccagagccttcctttcgaaacgccctcccagccttgaactctgcagttgtgtgcagacctcctgactcatcattccccttcttggtcattcctgtccctttgtgcacgagccataggaagactggtttcaggaattcacacaggagttaaatgtgctccttctcatcacaccagattccctttctccctgtgagttacctgtcaaccaaacctgaaggagtgtatctcaaaatgtggtctctggattccctatggcagcagcttctaaggagtttctaaaaaagcagatttctgggcccaaacacagactttgagaatgtctggggatgggtcccagaaatctgaattttaagcaagctccccattgggagactgaaacactactattcagataaccagagcccaaagtgtaatgatgccattgagcttaattgccagaaatgcattccctaagcactgcccccaccccgcaacctgccgctgcaatgtgggagactgcaactgcatgggcttcaattctgagttctgatgtctactggggaggtgatgtaaagcgtcttggatttgcgggtcttccaagaactcaagcaggtggtgttagagtcattactgggcaaggcaagaagtgccaccatcagccccatggacagagcttcctttgggtagtaagtgtttgcctgtcttttcacccactttgtctggctcccagaccttcctgagatcagcgtgagccacgtcaacctgaccgtacgagagggtgacaatgctgttatcacttgcaatggctctggatcaccccttcctgatgtggactggatagtcactgggctgcagtccatcaacactcaccaggtaggcatcctgggcttcagccccatcaggaggctagggagtgatcacactgtagtcttgaagaagagggaaaatttgcggtcttgttactataggaaaaaacacatagacttgggttacatgcagctgcaatattttctagccatttcgctctatacatgctactcaacttttctgtaacttaggttttgcttctgtaaaatggccatagtactgaactaccgttcacctcatagggttaataggaggatggcctgaactattgcctatgaggagcctggcatttggccagtgtgctttcacacaaagatctccttcgccttccgctcagctttccttttgattcctaaaggtatttggggattaggtagcagagccatccttgtagaagctatctgattgttatctttttattggggttttcagaccaatctgaactggaccaatgttcatgccatcaacttgacgctggtgaatgtgacgagtgaggacaatggcttcaccctgacgtgcattgcagagaacgtggtgggcatgagcaatgccagtgttgccctcactgtctactgtaagtgcatgttattgtgggggatggctgtgtgtgaggggcaactggcataggaggctggagaggggccaaggtgttgtcaggggtgagctagagcagtgagctgatctaccagtagggacagaaggactcttgtagggcaggactgagaagtaagtccttggactaaaaaccccagaaagagcacctttgtccctcagaagatggtgtggctccaagtcaactacatcttcaggacacttctaagttggcctattctgccttttatgaaacccctaagaggtcccaagagggagccctccagctaaggtggatctaggaagcttgcataaagacagacatctcttcccctctgctgggattgtggtgggacttctgcttccctcagccttttcagagtgggtggggaagaaccgggattcccattttagttgctggaaggctactgcaggaggtggtagactctgtgtcctggatttcagcaggcttctcccttgacagatcccccacgtgtggtgagcctggaggagcctgagctgcgcctggagcactgcatcgagtttgtggtgcgtggcaaccccccaccaacgctgcactggctgcacaatgggcagcctctgcgggagtccaagatcatccatgtggaatactaccaagagggagagatttccgagggctgcctgctcttcaacaagcccacccactacaacaatggcaactataccctcattgccaaaaacccactgggcacagccaaccagaccatcaatggccacttcctcaaggagccctttccaggtgagggcagcgtagctggatcggaggtgtatggattctttctacaagcttgggagatggggcatggtagcttgagaggagaagcagcatcagtactcatactgttatcatgggcaacaaaacacacactggaacatgtgcaaccaccagccgcatctggtataaacaaggatagagtctccattttccaatagcagtcatggtaaccaagacttcttagaaataacagttgtgcatgttagggcacactgtatgatagtagagaaagcagagacagtaatggtagagaattctgacccagccctttacttgtggggagactctgggcctgatagtttgcttttctaagcatcaatttccttttctatgaaatagtcatgattacactgctcctgtgacttttaaatgagtcaaggtatataaagcacgtcacagggtttgacacctgatgatggttccgggatttcccattgcaaaggacttgagagtgtgtccagtttaaccctccatttaacggatgaatgacctgatcctcattctacttgctgatctgtgacaaggtttgacttggatctaggcccccaggtctgtggcttcattcctctcttgttccatggtgagctactgtgggtcatacctgatgccctcagcttatgatagtgctaatgtcaagtggaccaggaaaaattattgaaattactgaagaactttgcttgatttgattttgggagttgattctgtctttctctgtctgggctaagatgctttaaatatctccctgaagttggaggagaaaaaaacaccaaaagagtttagtgaaagtgattgtagcatctttttgtgggttccgcaattgataagttttgcccataaagccatgtgtctttgctgagcttggtgcttcattttgggaagtgactaggagacctttggtcttcaatccctaggaatcaggagttctaatgggatacagtgtaaaaactgataagacacatacacacatgcacatgcatgctcacacacgtgcacaaagggaaaaggcagaaagagctagcagtatgtagcatctgtttttatgaagtcaacttcacagtctacaaattaccagggtgtggcagctccaggaagctttatttatgtcagtgcaagggaactcgtactggaggccctgagagtaaagtcggagaaatgtggctgcattaagctaaattcttgccgttgaggtcccagggatgatggagccgtcttttcggaggcagttgagaatgtgcagatgtttgaggccctggaaatcccatgtagtctgaaacttccatcatccccagaatgctcagtaaaagcccccatgacacttcccctcctgggtcacactgtgctctctttcagcaggtagatgagtcctggcctgcacagtggaagaagaggcttttagagcagagatattttgctcttatggtctacaagggcaggctaggtcttgttgacataaaagactgaaacgttgccctgcctgtggcctgattagagaataaattctgtttttaaagaggaaagtctatacattgttgagggaaagtcttgattggtgaggaaatgaagcaccctgaagcaatgtttctgtttccaaagagaagcttctggggcctagggaggggggaaccctagaatgctcaggagggaggagaagacactctggctccttctgccaggggtatcctgagaggtgtggggtagcagcagcagttggatgatgtggtggatacagcttctccgttctctcctttgtctcaggaggaagcaatactttgcgtcttctcagccctcagagctatctcagagatacctcctctgcccccacgagatgcagcagccccttctgttagtctctggatacccttgtcaccatagtcagttatcagtgctcctcaggccagtggttctcaaaagtgacctttggtccatggaccagccccatccacctcacctgagaatgtgttaaaacttaagttctcaagcgccactcacatctacggaatcagagattccagggtggggtctagcagctatgttttaacaagcccccaggtgactccagtactccctcctttgcaatctactaccctggaattgagtgggaatctggccccaggaggatggagggaggatagagtcacagagaaactcaaagagaaagcacctcacctgaggtcatttcctcagacccatctccatcctgctagggtcaccctgtgggaagatttgcttgttttgtgagtctaggttaaagggatcaatgggtgatgaaaaggcagtgacagggaaacgatgccaagtgacaagatgcttaaacgctcaagagagtcaattatctgggggtgcaggaagagatgagtcatagccctctaaaccgaactcaccccagctaagcctagatgcaaagctggtctgtgattcttgctcttctcttttgatgtgaaagtgtggagacatcgtgattatcatgtgtgtttctcttttgcttccaggcagctaagcatggaggctaagagcaggcagtctgaaatcagacagacttaggtgcaggtcccatctgtggcccctcccagatagccctcccatctggtggcctgggctcctagcatggggcttagtgcaaggccagtactagatggaggacaatcacttctctgtgcctctatttctgtatccatgaaatgggaatgataatatctcccatctaagctaccatgagacttaaaggaagttatgcctgccaagtgcatagcagtgcgtctggacagagaaaaggcttactagctgtgggccattgttaagattcttaggatgtagagctgagatgaattcaagagttctagaaccagtagtcattttctggtcaacctagtaagttctaacagataatgttaaggtagtctaggctagttgtcatggaaccacgttgccagggctctgactctgactcaatcacttgtcagctctgtgacgtcaggcaaattgcttcaccttcctgcttttaccttaaaggttgtggtgaagattaatttacagaaggggcgcttcttgaagagttatggtctgggactgtaggagacatgtgtattcccttcatggcacagccccagttcatgtccagattgttccttggtgtgctggacaagcgctcctcccagcctgctggtgcagtcagaggtgaggaccagtcctgggtaccatcctcttccaggctgaatgcctgaaccctcccacaggttagagaggagtcaggatgtctccttcttccaaagcttatgtgctttctggatgtataaatgcttccaggccctggcaaaggccttaaacactcataggctgatttggagataacagggttcacagacttgaccaaaacatttggctaacgtgagaatattctctaataaatgggagccttatgagacatatgcaaatgaatgtaaactgcgaattgatctggcacctctcttctctcaggctctgaaacccaggctagagcttccatttcctccatcctccccctgccccagtcaggcttctggtcacctgctgttgagaagagggtgttggcacgaagggtatgcccaggaatgtgaagatagttctgtgaccatcccccaaaacaatacagaacagacaacaaacaagcaaccgaactgcgtgtaccataagtaaggctttctttgaaggactccatcacagaaagtatccgattccccacaagtagttagagaatatctgctggttcatacttaatagagctaagactgtgagggcccgcaatgagtgaatgaatgggtgaatgaatgaatgaatacacttttacttttcagggcatggtgggctgaggcaggaggctgtgtagtattgatatagtgcattccaaagggaacagcagcatcagcgtctgctgaaaacttgttagaaatgcaaaatcttgatacccaccccaggtctactgaattagaaactctaaggtgaggactagtaatctgtgtttctttttaatttttaaagatttttaacttttcattttgaaatagtttggaattcatattttaaaaagttacaaaatcatacaaggcacttccttccaccctttgtccagcttccccagatgttaacatcttacctaaccacgatgcaatgatcgaaaccaggttgttaacattggtccatcactattatctagtgtacagatgtgaattacatttcatcacttgtcccattgatgctttttccttgtctaggatccaattcagaattacacactgcgttgagttcctgtgtcatctcactctctttaaatctgggacagttccctagtctttgtctttcatgatcttggaactttgcaagaatactagtttttttgtagactgtctttccatttggaattttctgatttttttcttaatgattaatttctagctatgcatttttggcaggaactctgcagaagtgatgctctgccctctcagtgcatcgtttcgggggcgcgtgatgtcgataggttttggtactgggggtgttgactttattacttggtcaaggtggtgtctgccaggtttctctgctgcaaacagatgattttcccctttgtaagaaatcagtataatatttttaaactacataaatagcttgtttctcatccttctttcacactctaacattcattgatgattcttgcctgaaacaattattactgtaatatttgtgaaatggtgatttttctatttttatcattccttctacatttaaaaatcagaattctcttgtaaggaagagcatttcattcttccaccttttatttattgaattgtttatttgtatcaatatggactcatggatatttattttgttctatggctggtaattcatgtattcgtttgctaggaatgtcacagcagtgaaataccatagactgggtggcttaaacaacagaaatttatttcctcacaattctggaggctggaagcctgagataaaggtgttggcagggatggtttctcctgaggcctgtctgcttggcttgcagatggcagtgttctctttgtgttgtcatgtgattttccctctgtgcgtgtgtgttgacgttcaaatttcctcttataaggacatcaaccatatttgattaggactcaccctaatggccttattttaactttaatacatctttaaagaccttttctccagatagtcacattctgaagtactaggggttacagtttctgtatatggattttgggactacataatcctaatccataacaatccaggactatcattgttttgttgcttaaatgatcctacatttggctattgagatcccctgtacattggctcctgtgccctgtctccaggcctccattaatctttgagcactttcttactttttagtattacaagccattccaggcacatgttgtactttccctggtccggccctgaaatcatccatttctccaaggaatcctcactccttttattggatgttggtagcaatcaccatctgggtgcttctgttgtgtgctaaagtttgagcatttctggtagagtgggcaagagcctggacggagatttgaattcagctctaatttcttcttaaatgagtgacatccaattagttacttaatctgtataagcctgtttccttatctgttaagtggggataatgctaccacctcttagaatggtaataaggattgagtgatgtgctacatgaagcatttaacaccatccctcgcttataatcaatgtgcaataaggattagctttcattattagttgagctatttctagagaccaaagatcaaataacatgttaccatctgcaggacgggcagattctagagggattctcaagaacttctcagtgacctgctagaatcaactctgcatattactttgaataagtttatcttgagatcatacctggcattttcaaagaatgtctaggggagcccaccctgtcgccccattcccagcactttgggtccttaagaaagcagagctgtgaatgagacagagggtctagttttaattccctatcatctcataatgaacctggtttggtttctcgttcctagatgggccacctcccttgaaaccaggaactttatctctcattccttctccatttggaggaccaccccctaaactggtagtgtagcatggggagacgggtgatgtgccatgcattttagtttgtcagttgccatgagaacagggaatcatggtgaatgggagagatcatagctattaggaccaagtagtgtgtctgttctggtttttattaaatttgttaattatctctttgtcctttttttgcagagagcacggataactttatcttgtgtaagtctgctttacctgttgctttgaaactgatttattctgatactatcggtaactattgaattcaaatagccctctctcctattccacatcatccctggcccatggcagctgagggcatctgagtgaactgtgaaagggaaatgaagggtagcaatgctttttaggcagttccaagcccacttttcttgggtaatcactctgtggttcactatcccccagggagttttctaatgtctgatgatgttgtggatctctttacctggataaagaggggctgtgtgaggatggacatgggtttcatgtgcctcaatagacccctattgatcatcttagttgttcttgcagagagaatatggaacctataaacctgctagtgtttctcacctgcttcaggagcctgagcacttggccaggactcgcctcatgagagcttgacttacaaggtttcctgataggctcatgtgtcctcagaaggaattattgaggctcagtttataagtgatttggggctagggctagacaatcctaaaagaatttggggttttgtttatggactgtagggaaacctgtgtttattcctttttcttttttttctccatgggaggtgggaataatagcagcaactgctgccatttttgcctcgtgtctggcttgagataataggtgctgtttagaaacaccctcggctttctggcactgatgtcaatatctgtgatttctttagttgtcttcagccttagaggacttgtaatcttgcagaatattccttcagagaattctgaattggggccatttcttgtcaaggaggtgattctagatggtggagtgaggggaaaattgatacttagcttcccatcctggccttgctgggtaaaggtggtgtttcccggtcagatggttctatttttttaacttaagctgcccttgtgttctgaaatcagtgttaggggaatggatagtgggctgattgatggatccccaggcctcctggatctcactgaggagtaaagaaggaaagagggagggcacaggaaaggcagggagaggaaaaggaatgcctgtggcaaggagtagcagaatgtcagcaacagctgccaccaccagtaacatttgcctaatccagaccctggccaggatcccaaaccatgtttctttttttctgttctatagctcatggcccaagttgcccaggttatgttattttctctggggttggggcagggaatgggactgaatgtcctttattcctatggagcctgtgcttgaactgtaacaccagccagatggtcagataggaacctggtctgtgggggtggggggtcctgcaaagcctggggaaggcagactgcaagagcctggctttcagaggatgttctgcagggggaagtctcaagggagcttgggagttgggcagggactgtggctgagcctccccagccgggaagctaactgtcctcctcctttttgtgtttggttttcagttgacgaagtgagtcccacacctcctatcactgtgacccacaaaccagaagaagacacttttggggtgagtcacttcttggtcaagaggagtgtgttgactggcatagtcattttcagacttcatttgtgttgctaacttttccaaatattatcttacttgaaactttgaaaaaaaaaagtaatgaattgaactacgttcaggcagtttaaaccttccttgttggatggaaatagttcattgtttgaggaaatgtttgacgatctgctccaagccctagggttcagaaaatccccagtctgttaggagcccagctgggcctgatttgcaggggctgctaactgtacaagtttcctacaaaaggccaagttgctcaaggcatctccttgggtgtgttttcaagcgcccactcctactatttcagagcctaagattactctggggaggaggagaaaggattctttttagaatccagatcttttcgactttcctggataagaatgttatataaggaattttaacatgaagatgcagaattcacttgctaattaaaacaaaatcagacgcctctctaggcttgtttttgcatctgttagaatggccccaggtgagaaggggctcagaacattgaatcgtggaactttctctaatcaaattgggtaatttatatacttttaaatgttctaagggtctcatatatttcttcttctaaagaccttactcagtattgcagttctgagaaggctacaattactatggcagtaggactgttcttatctgggcacacacattattttcaaggaaattgggttttctgtgattgttgctgactctctgtttctggttcctcacaggtatccatagcagttggacttgctgcttttgcctgtgtcctgttggtggttctcttcgtcatgatcaacaaatatggtcgacggtccaaatttggaatgaagggtaaggtgggagtttcattttcaagggcgtcatggggggaaacattactgcttttgatcaaaagatactgttttaatctcccattgctctctgagagggcctccggtcatggggtctaactggtactgatggaaactcctgtttgccgcttgttcttggtaattatggattgaaggcagtgttgggatctgtgggaaccaaactgtagatccacatggttttgctttgactgctgataaacattgcttagaagggcttatgcaatgaggataatttggaaaggaagttggatttcagggcaaatgaagacggactttggtttattttcattacgggtgagtaaagggactcctagtttgaggacacggttttcctcttgtttttgaagttgtgttgggaaggcgtcagcacagcaagatgtagggtagactccggcattgaaaagctgcccatgcaatgggatctcagcacgtagctctacacagagtcccagagtggatgccaagagcaacatgatttctaaatctgctggctggcttccatgacatacagtgctccactccactgtggcagggtggggtggtgggatatggctctttgccaaggctcgggtaaggggactggcatgaaaggggttaacatggtgaattagcatccacctgcctggtctcagagatggatgtgaccaaatggttcaagagaggctgggtaccagttccaaaacagaaacttgaatttcaagatatactcccagctggggtttccatgtttggcgatgttgggtgggggtgggtagggaggcatgatacgaggtttgataagttatcagtttgctgagccaggactcaggttggtgttatctggtgagactatgggatgtgtagagagatgaatttctatggattctctgcatgagcttgtgtctgtggttggggaccttggggcttagggactgaagaagagtacatgaatggcattcacagggacggtgatcctctgagttgtatgcaaatgttggagtgtttgcgcatggaaccgaactagtccatagctttcgctatattctcagaaacctctgtaactccttgaaaattcagaacactgatatatagggaaatacccagagaggattagaagggtagaaaaccctgtaaacccagctactcaggaggctgaggtgggaagattgattgagcacaggaggtcaaggctgcagtgagctgtcatcacaccactgcattccggtctgggcaacaaagaaagaccctgtctcaaaaacaaacaacaaacaaaaaatgggtacagggtgccctgtttccagaagatttctgcctttgcactctctgctcttgatgaacctgatcaactcacagcaaagcaagctagtttttcttaagtcatctgagatattttgaccaagagaaagacatgtgcaggcaaattataaaggtggatggaagtttggctggaatccagatgacttaaacaaaatcagaccacttttaggcacctagattggagatgtcttatctgcaaacacaacatgccaaacaaggctttctagatctagaagatgagacgaccactgagtgagcgcacagctttcaatctttggataattcttgggctcctggttttgaggactggcactattattgcctgtgcaaagttttcctaccatgcagggagcttttatagctcttcctccttccacctgagaaaacatcagggccttgaccaaagggaagaatggggcattgttgctcttcccctgaggaggcgcaccaccagctgagaccctgcgacatgcttggcagtgctgtaagagcagatttttcctattaattgtcatcctgtttctggaacagcatgtccccatgtcggatggattaggcagcacccagggtggttcctcccctcagctgtcctcagagcttctcccagcccctgctcccctctcccaggcagaccttcctttcttggccctggttgggtcaggagaacatgtccacgtaggtggaagtgaaatatcctctattgtaaagtcgggcaacttaaagtaagttatactggagttataggcaagatgagatggtgtatctaagactcaccttgtttagaattaagcctgaatctctttcatctttatgaagccagattatgtttgggtctcactttaggataaataagtgcaaaacaaaaataaaattctaagccccccaaccatccgaatgcatccctcttctcaacaagggcatcccaaagttaacctgaaaaactagttcagaccatgatgggaagcagggagccatacatgcctcattaaaccctccttctttttggaattactgatagaatagactcgttaagtctgatgagaaacatttgcaatctattctgtctgatgcctgctacctggaggcttcatctgcatcataaaaccttggtctccataacctcttattgaaccttcctattgaaaataactctttcaaccaattgccaatcagaaaatctttgaatatgcctatgacttggaagcccctgcttccagttgtcctgcctttctggtcggaactaatgtacatcttacatgtattgattgatgccttatgtctccctaaactgcataaaaccaagttgtggcccagccaccttaggcacatgttctaaggatctcctgagggctgtgtcacaggccattggtcactcatatttggctcggaataaatctcttcaattattttaccgagtttgactcttttctttgacataagcaaatgcctcaagctgcattaacctttgatcttttattgccagcgagcatcacagtcttggataaagagtgatgacaccggtaccagaagttccctaccttttacttagggaaagccttgtctcttcacatccaccccagtctcagttttgaattttcaagtctgggtgagaatgtacgataccacttaattgctcattggcttcagcaaagttactaccttctcagtgcctctgtttcctcaactccagaatggtaataatactacctccctcactgggttgctgtgagtgtcaagatctatgtgtaactggcatataaaaaggctccatgggaacatttctcccttcttttctttatgtataaaccttcataggttccttttattgccttccaaaaagggctgcccatccaagacgcaatcatgccctcttttgtcctgcacaatatttagtaaaatgcctttattatacgctaatcccagtacattgtcatttctttgctggtagaccatatgtctgtcctacttgaccaggagcgacctatggcagaaatcacagatcactcagcctagtatgcctgaaaacaccacgcaacatttgacaattgcttgttgaatttagaaatgaatgactttaattttaataataaaaaaagtacagcttataaattaacaatgggctagttagagttaattgggagatctgagatgtctgggcagtgggaagtagagagatgatgatagggaaaactcataaacaattccccatccacatctgagggccaggtgtatcgatagggagggcctactaataggagctttacttccttctgagaaataaaaaaaatacagaaaaagacaaagattaatataacaaacacccatattccctccacctagaataaatgacttactgttttgtcttatatttgcatttactgctttagtttgggaagatataaaatatgactaaaactaaaacccctttagtcatccccctggtcctattcccatccccatctccataggcagccactagcctaagttcagcatcctccagttcactgactgaagcttctttccctgtatctctgtctctgtgtgtctctgtcagctgtctctcccctcatggctgtctcccagataaactcacacctcccagactgccaaattagcaaccacctctactacatgaaagatgagtggctaaggctggtaaacagttcattttcatacttctacctatatgtatatgtacacatatatgcatatgtctctgtatatccatatgtagacacacagacatgcatatatatcagtatacttacaaaatgcattactctgtgagtgttttaatttatattcatgcttatactctgagtaacttgcatcttgctttatttccttgtcatatgttggagatctctctctgtcggtatgtgtaggaattccaatgggtgcccattttatgggagatgaatatattaaccagatctcctagaaacaaaccgaacatgctttgtctcagagccctccaactgccatgttgatcaaaattttggcttggggaaggggtcaccttgggacacaagctcatcttcttttggaatcacaaaggttttaagatggtgctaagtgtacagtgggggtttctttttgctattgatgaagtctaatgcttcagagtggcaggggtgatttgtgaagtatttggcatgtcctgggcactgccctatcagccagccctcctgctggagcagggccctggaggtccccactgtgctagacattaactctttgattgtcagatcatggggtggccagggtggttgggaggtgtgtacttgtggggttcagggcatgggctatttactgcagctacagaaacatataaaaatatttcagcattttaacaactaactagagtgtacccttgcatcctgggcctggaagtgagatggttcagaatttaggacaaattcattctcataaaatattgttaaattaggcattaaaagatcatgacagtgatctggctgggctctcctgtatccgtatttccaggtgaagaaaccgaggcccagacaaggaagtgacttgctttggtttggctgagttttagctccaacctctttccacagcaacacaaatgccctgactcctttgtcttggctgcacactgtccacatccatagtgcaccatcatcatttcacgtcgtcattagaacaataaccaggcaataggtgttagtgtgtctgaacaataataaaacttgctctgtagttttcatataaggtgagcatcaaaattatttaatagaaagtataaggtgagcatcataattatttaatagaaaaagaagcaagtgtgtggatcttttgcagtctgtaaaaaaaatacatacattatttggcctcttttcctcttgaccacctcataagtatctttaaatacttctagatcagagatactgtgagaattacttcatacttcttggcttcctcttactcccatgaagaaaacagaataatagtttatcagagctgaaacagaccttaggcttattaggctaatgtgcccattgtacagctaaggaaactgagacccagagagatgcagtgatgtgccagagcacacagctagcgagagccttctggccctgcttttccacatacttgacttgtgcagagaacctgggagggtcagggaaatgaagctggattatgaatacatcagctcaatccctccaaggctctgattaattaactttgaatgctgtgccacttaaatggggctttcgaaaattctcttattaatccactttttccaacctggggcactcctggccttggggaaagataggagctgatggaggagtaggctccaagaacttccttcatttattttcagacatgctagagactgcacgcgtggcaggacagcggaagtgggaaggccgggaaggaagggcatcaagaactgctgcttgggcttccggcaatgccttaagtgcctcatcagcaaccacttgcctttcttcctaatggctggatgtgtgctggtgcctctgatgggcctgcggatgagcacttgcaggactgttccattgtaaattagcgttagttaataggtacttaaagtaaagtggttgcctatttgattatgattgggggttattaacatttttttccataaacagatggtaactgtcctctgagtggattgtagaatcctgccagagtcttgatttggagggactggctcctgccaaaagatctcaggggctgctgccacattgaacattcttgttatccttctggtttcaccggttgtctaagggaatgattagagttgggaaggagtcatttctgccttctctcctaaccttggggcattggactgagaagggtttcttccaggtggagggaggtaggggtgggagggatctaggactcctgagttttgatgctgtaggttggcatttctttctcagctggaacagagtgtccctatgtcttagccatgtgtgcagagcaggggaattggtactggaagtgtggtgtgtgataggagatatccgaggtgactgaaagggggctgggaccatggatgaaagcactattggtattgttgagtaaaatagtttctttcaccctgcacaatacacttatttgactacatttagcagggggtcgggaaccaagagcagtgcaaggcggaaatgaaactgggtaaaggaattgggtttcctggcttcccaagatgtgtccattctttgctcctcctcgttttcttccttcttgacttctttttctatttcctcctctgaattgacatgtgcaagggaggagggtacctttggcccttgccatgatcctgtacttgggattcctggtgtaagatgactctttgaacataatgttgagagtggtttctggcttctttcctgtgttgtgatcccagggtcctcgtattctcctaacaaatgtttgcatgccctccctctcttttctgacatttgacagaccttccaaccaccccgcttcctcaaaaatgcctagtatttgacaaattctaaattaaagaggttaggtttgtagcagatccacaggcaggacataaatttatagaagccaggggtcttctgcgtctccttctctgctttgaacttcaatgggaggctctgactgcagacaaaggcccaccccacttgatgactgagttctagaatgtggtgcttggagctttgagaaggctgtaaagccatgtgtgtttttctggcatgcttttgctgccctgtcctttgtgggagctttgcaggggtgcagtgaatcatcatagaagtccctacacggtcaccattggtcgtgtggaggctgaacttgctctgaagactccagggaaccaactgttcccttgcatcgactctcctattcaaagggaattcccttgaaatagaggctgatgcaaaatatttttcctctgtggctacctgctagctggctcttcttggcaggcctctctatcctgttcagcagggccaaggatgaccactatgcttggctctatagccgaagtgatggcatctcagattcattgagtgttggcagcagagcacagtgcttactgactcgtgttgttgcaaatggctcccacagggttaacagccccgcgataccttacccagtttagacattctgcacctcttgtcccttgctactcatgtgacaggtgagatcacatgccttatgccctactgtggatgtcaccgggctttcccaaaagtgctggctctcacagtaattttacaccttaggaaactataacagaagatgagttagtaaatgagattttaaaagctaagaataatagtaaattcaaactgatttttggcttttaaaaagtcacaaactttagtaatttatttttcaccaaaaatcatggtgacatacttcctcactgatccagttatcctacagtatcatggtacaggatggaaaaccaagaggggctggggttgccagctttgactttctagcatccttctttgttccaaatgttttttaccccctgtaaagtcaagttgtggaaactgctccaacagaccccctcctctcttctcatggaacattctttctctctctgcatattctcctctgggtcttggaagctttcacttgcgcggaagaggcatgatgataggctttggctaatgagaagctgtcatgtggctgcagtacccaagacccgcgtttatgcagctcattctcctgtgaactctgcagagggctttaggatggccaaagagcagccctggaaaccaaagacagcaaaacagagagatcaaaacaactgctaaccagaaaacatgtttttggactagggaagaaaaaccacatgctgaaaacagcagccaccaagccaacggctgcaaatccccggccccagctccttgacacccactgccctttgtgctgtggttcctcatggaggataagctgggcaggggagtagagaggagtgcactgcaggtggaggaatagcatccttcagccagctgtgcttccagcaagcaggtgtgtctgccacctgttccagggaaggaagcagaagcctgaggctggtctatctctggcccttgcactcagaagggttaataacactccctgtctctcttcctcactatcccagcatacttagagagagaccaaccaagtaactctggtgcctgcttctttattgttttctcttggatgaactctgttaccacaagccagagggaaacatgctgctggcttcctccctaatgggatcggctacctaatttgtgtggcccagtgaaaaatgttcaaaaaagattagaatttccagacagctacagcacagcattaaatcccaagctaaggttcttttgagcacagagtcaggtcacaggtccacgaagctagctctgcttcctgaatacaaaatccatcatggcttaagatcctagctcctttgtctatcctgaatggtgatgaaacaggtatttctgtacttccttttagagagaagctgggatttgggcgaaagacaagaatatcagttggtttttcacttctaatcatagtaggggaagagagtgacaggcatcaaacattcattgagtacctactgtgtgccagacatctaatatatcttcaaatatagagacttcataggtggctattattcccactttaaagatgagaaaactgctcagaatggttaaatcactcaaggtcatgtacctggtaagtatcaaaactagattttaaatgagtttattctaaattgttggttctcaatcttagctgcacattctaaacatctgataagattatataacttcccaaacctaggccacactccaggtcacttaattcaggggtgggtgttcttttttacttcctctggtgatttctatgtgcagctaaggttgaggaacaatggtctcaatccaatagacgtccgcatatttcactggctctccaagtcatttatgtagtctgcagaccagctcatctgataatgctgggagcttgttcgatgtgcagttgcctagggtttaccccatacccactgaatcaaacttggggtgattggggtacaagcaatttctctgagtgatcctgaatgattgctggggtttaggaaccaccatcctatatctgtagagagacaatggctgataacatgaacggtacttctcaaacttgaacatgcaagtgaatattggaagattctggggatcttgttaaaaatgtggattctggttcaataggtctggggaaggctgcgagtcaacatttgttacaaggtcccagacaatgctgctctgtggaccatgctttaagtaataaggggtaaagttactggtaaatacttcaggcctgcgacctgggaacttagatcacctctctgctttttgttttttcctgagtgccagttgcaaaatgaacctacctcaaaggtctataggctgggattttgtgactataagattacaaactataaccaccatttttttttttttaaatttttgtacttttagtagatacggggtttcaccatgttggccaggctgatctcgaactcctgacctgaggtgatgcacccatctgggcctcccaaagtgctgggattataggcatgagccaccacaccgggcctctataaccactacttgtaaggcatttcagttctatcctctttgggtaaatatgcctctcttctttcctaaaactgtttctatagtggcttccttggttcgaaaccaaactgccacctctttccacatgacgggacttgtaaggtctgctgccccagttgatttcagtaaactgtcaggtcaatcaacactgttgcccccactgaaggagtctgggcagaagctcagagaggctagcaggcagtgggtagccagcattcccagctcagagctccttgagctgctgtgacagtcattcctctctttccttagaaacttctttatcctgtttgctctccctcccacccctgatctggaatgaaatgttgagggctataaaaaaccggaaaagcttgtgctggcaggccccggagtggctcggagtgggtctgtcggtgggcggaggaagccccatgggttaagttggtgggctgcccgggctgcccgccggcctcagagacactgccctaggtggtggctggaatcccattcttcccagtcttgctgctctggcggttggtattcacactgaaagcctgccctgccctccaatttactgcagaataagagttgcatagttggcagaagaccagagcagtttccaggactgataagtcctggaaatgccgagcctctctacctgacaggcatcttgaattcaaaggggcctctgtgctggagcagccctgcaaacctgttcccaggcaggggcagaagaatgccagcatctgtctatctgccagcaggccttgacatgaagccccaaggagggcgtccgggtggttccaggaactgcctttcaaaagtgaatccttccaaataaatggagttcagtgggttagccttggaccagttgaaggaggtgcagaggggcaccctgttgttggcctgggctctaggggaagcaggcaggatttgagtactgttatgagccattatgtgtgaaaatggctgccatagcaccagcccgctgctttgtgcctgctttgcaaggggcatgccaacctgagggagctgtgtgtgctgcttgctgccttctgaggagaagcgctatcagaaatcaggggccatccaagagcttgggaaaatggacactgtttgctgttgcccagtgtgtagaatggggtagcctttctggaaagtggcttgacaatatttattaaaaacctaaaatcacaaaagcccatgcctactgactccacttctgagaatttaacctaaggtaatactcacaaatggctatctgtatttgtggatatgggtatttatcccagtgtgacttacagagtaaacttgataaataaataattacttacagatctaacaataaatgactagttaaatattaatacattatggtccatatatatgataaatacaatgcagaccttaaaaatgacaacttttaaaagtaggtatttaatgtttctgaaaggatacatatgcaaatggtaagaaaacctaatagtataaaagataatggagtaaaaatgttagtttcagtcccttcctaatttcctgccactgggataaccattacttagaggttcttgcatatcctttcagagatagtcaaggcttatgcaaggatatgtttccctgttgcctttgcacaaatgcaagcttgtattcacattgttctgtgccacattatttctgctaacagcctgtctttgagatgagttagtatcagttcatagagatctactgcattctatttttatagttgcataccaagaatgatattttagcaatatgtattgacatgtgaacatgtttacaatatatttccaagtgagaaaagactccaagcagtttctctaatgccatttttttttgttgttgtaaaataaagagaaaatatttttatacacatacctaggaaaaatactaggatcatatggaattataagtcagaatgtaaacagtagttatctttgggtggtgggatttgggatttttttaatttcatcttttttgatgtcttctgaggtttctgtattgaaccttaaaaacaaagcaaagcagatgtgagacccatgaggacaggggagctgttcctccctcagtggatccagaggctgactcattcccccacccaggatccatctgcccctttgtggtgaaagccacggctctggtgtcacttaggattgctgactgcacagagcaggattcccataatgttgcctcatgccacatgcttgacagtcattgatggtggtgtgtgtgtgtggttgttgttggtggtggggggggtactgattaaagtgcagattcctgggtcacatctactgaatctcataccttgatagtaggccctgggaatttgcattcttaaaaaacaggctgggtggtcatactgccattaaagtttgagaaactattgtgtagatcaggaatttgccaactttttcataaaagagcagagagtaaatattttagactttgctggccatatggtttctgttgcaatcactcaaggctgctgttgtagcatgaaaacaatcatagccaatatgtaaatgaatgagcatggctgtgttccaataaaactttatttataaaaaacaggtgccaggccagatttggcctgcaggccatagtttcagaccccatagtttcatgttacccttaaaaaaaaagttagaccagctgtggtggctcatgcctataatcccagcactttgggaggctgaggcggctggatcacctgaggtcaagagtttgagaccagcctggccaacatggcgaaactccatctctactaaaaatataaaaattagccgggcgtggtcgtgtgcacctttaatcccagctactcaggaggctgaggcaggagaatcacttgaacccaggaggcagaggttgcagtgagccaagatcacgccactgcactccagcctgggcaatggagtgagactctgtctcaaaaaaaaaaaaaaaaaaaaaagaaattgatcagcaggtgggggagtctaccaagagctccttctatttgaagaagcaggtcataatattaatagctacaattaattaagtgattattataagcctggcagtttccagacaaaacctacaccttaatacagccctgcatagtagctataccaacaaggccattgaaagaacaaagtgattagcccaagcttacatgatcagtaatgactgggttggtctgaatgcagacttggggaagaaagcggtaatgccacagttctgttactttctggtctttgggaaagaatgatttcaaaatctcttcccagggcatcgggcacacacaggtccctctaagcccccagcctaaggaggaatagccacagccacgcacttggtggtggtgcagatcctggggtaactctgtacctcccggatgcctcgaataattggggttgtgagtggtgtggggtcttccaggtgcattggacaatgctcaggttgatgtggctccgttcactttcttgaagcgggggagagtgctgttgctatagaaatagctcaggtcactgtgctggacctttctgaaccctgctgctcagagtctcccatcactgggaccaagagcccttagagccaggctcctgacaggagacttttttgtgtccctgctccagtgaccatgcaagtttccacatggccagtgttaaacattcaccctgcttaaagcccatggagataggttagtgccctacttgtctgcagacagggctggccaagagagactggcagtggcaggcagaaggcagtccctcgcttccttctgtcttctccccaccccagccttcctgaccttcaaccacatcccgactctagggcaaagaaaaaccctctgggctgaattcagcctctggggctcatggttcagcttgatggctttgccaggtagcaacatgggtgatgctagtcccctgtgaggtaactgttataaagatactagtgttttacatttatagacagcccagtttgccttgacatgttggtttattacataaaatcttgaaggcttgggctgctcattggattaactgaaataatggacataaaacagaaaccagaggctgagcatggtggctcacgcctgtaatcctagcactttgggaggccaaggcgggcggatcacgaggtcaggagatcaagaccatcctggctaacattgtgaaaccctgtctctactaaaaatacaaaaaattagctgggcgtggtggcgggtgcctgtagtcccagctactcaggaggctgaggcaggagaatggcgtgtaccttggaggcggagcttgcagtgagccgagatcgtgccactgcactccagcctgggtgacagagtgagactctgtctgtctcaaaaaaaaaaaacaaaaacaaaaaaaaaaccagaaaccagaacttggaatccagaacccagaacacactgctcaaccaaatagtagcaaattgtatcattgttaccatccatattatgacaatcagtagtccacacagcagcccctttaaatcgatattatcattctgtttttcacacatgagaaaactgagattcacagaccctgctagagttctaaggagggtcacaggtttgtctggcttccaagccacatgctcttagtcactatcatacattttaaagtcagaatataaggagacctagggctgctgggaaccttagggagtccccatcccagggacctgcagaaagcccttgacagattattcttcagttccctcaatcacctgagagcctcctgccttcccacaaaccagtgagtgtcaaactccctaagctaacagcttcatactgtcctcttatcagttaataagctgcttacccagcctcaggtggacatttggctgcgggttaatggggccttttttggccctggtcctggccctttaatccactctcccacccctttctgctgtctttctctctctccaaggatgcaagtattagtacttcgggaaacaacataacacctcctggtagaaacctcaattccatattgcacctgaggtcgtgactagccacttgccttggaaggaccctatccaggttcaaggaggcagcttaggcaggtgtgaagcagcagcctggatagatgcctcagccattgagccccaaaccatgcccggggtgaacccccaccccatcgctcatcatctgtatctcagtgaatttcctgtaaactagagacataggagtcattcttgacatgtcttcttgcccagtccccatctctttacccctccatgctcttgcacagcccagtcttgtctttgtgacctaaatatctcctgaagttgtcccttctctctttgcacactgccaccccaccattccatctgggctcctcccacatggctctggacctggccccttcagtgtgtgccctgctctgtaatcacagtagcagactcaggactttgaaatgaaaattgggttctgtagtagactcctggttctgaaatgaaaattgggcccaggagtctagctcctgccatgtccccagtctcaccgagctatagggtttccactcttgccagccttgttccatgctccctaagactgaggttcctcatgcaccttccctctgtagcactttgcacagttattgacaggaacatttgattagtgctttgcctctccaagtagactgttgtgtttgctcactgcagtaccactcatgtcagcagaccacttaaggcatagggtgcataaatgtcctctgggccccttgggcattgcacccaaagggctggacctggagctcctcctctgaccacccctagttttgttactactgtggtgaagatataatctgggatctttccttttggtacctgtggattgcctgtaagatggaggcagggatattctgggggagaatgttctcctccatccaacagctcttgccttgcatttcttccttctgcctaccccacggtgcctgcagacaggaagacgctaggtctgacctgccttttcctaagatcccacctccatgtttacctgatcttctttcttccttattgtctctttctttacccaccactttgtgcagtatctggccaatgctatggcttcttttccatgccatgacactaagatttcttccccagtcatcctactggggctcattaaaatttagagctatacaggctgaggtcgaatctcagttctgctgcttgggagctgtgggacttcaggtgacttatggaccattctgggcctccacaccctcagctgacaaatgagagggataattcttatcatacagggttttatgagaattaaatgaaattgtgtatataaagcaattagcttagtccccagctgtgtagtaatcactcagttaatgtgttgaggggagaaatcatgatttttgctgcactcagaaaagctgtgagtaatctgcaggtcccattatggctgtggttcatacacttggttttatggtagaatcgcatggggatctttaaaaaatttcaacagctaggctactcccccagccagtgggtcagaatctcagtggatgggctcttggtgttggttgtttctatagctgctcaggtgattttcagtgggaagctaaggctgtcagcctgggctttcccaacgccccccgcccagccccccacctctttctgccagagcacatatcttggaactttaaaggaataggagggatgcgggctgaaaacatggcgggaaaagctctctttattgggctcccacgacgtctctggcactgtgcttggtgcttcactttcatgtttccatttgattttcactgtgacttgtgatacaaaaattattgtccctgcttcttttaggagcttcaggaaggacgagctccttgcttaatgtcaggtattaggtggcttaaggatgaaggaccacgattcgaggttggtgaggttggggtgaggacgctgtcccctcttctctccctcctgcagagtgctcctttggtgaggtgactgaacgccccaattttccccaccctctgcgtgaggcctggctactgcacctgtccactgcagtatttaatgacccagcctgcttgcggctcaccgggccctcgccagtgatctgccacctgttctaccttgcgcggtggtgctgtttgcttaacggggaaatttaagtgccttgcaaagactccccatggattgggggagaagcatccgctgactagaaatgggagcattgttgttgttttgttattgccataaatttccaggcactctgttgggttggaaaatagtgaggggtggatgggcagagagagggagggattctttcttgtctgactgtgcaagtggattagagagagaattctctccttcatagctcctcgaactttatggtgcacgtggagccctggggatcttgttatgatgcagattctggtttgataggtctggggtagggcctgaggttctgcatttctgccaagctccttatatgaggctggtcctattggtctgctagccacacttggcttagcaaagctatagcttccaagtgagggagactcaagtctgttttttggcccctgcaatttttattttggaaagtgtcatggaatgttatagaaatctggattctagcccaggctacactctgatttatctttggatatcttttgagctttacttttatcctctataattggagggatttggattaagggcttccaaggtccctttcagttgtaacattctatgattctgtcagttggagagggtagatcacagggagcatggagtgaggaggatgggaactagtgggaggtgggagttgtcaggagcacccattgcatatatgggctattctttttaggatcaccaggtttgaatcctgagaggccagaagtgaggaaaataggcaatgaacttccttttgtgctgtgtgtccaagatcccagcgtagactatgaactccgggcaggtagtgacagtgactcttacttcctgactcacatacttggcttctccaaatggcaggagtgtatttggggatgttagccattctgtgggtttcatggagggtaggcactgtgggacacagatacaagcaaggcacacttttcatccttggtgagcacagtgttttcttaagagaatggcatatctttcagaacctggagtcttgctgttactttcagattggaattgctcttcctgatactgtgtgtccagcaactggggtctttgcctatgggctactgtcagcgtctcctgatgtcctgactgttggttctgggtctgcccctacctgcccaacagtgtatctctaggatgtcgcttgctctccaccttggggtcctctacttgcctgccattgggatatctctgctttctgcccctctcccgcttgttggtctcttggatgcccaggtagtgaccacttccagtttggctctcccactgctgactgggacttagtgatgatagtacattctatttggtgggttcaggtctgagatcgtgtgatatttttatgttgctattccctgcagaggatttcacacacaggcaggctttatccattcttcccaattagacacatctgtgtgcaaatggataggccttgggctcctgtctctcactgctcttgagagaccaggaatgggccacaattgggccagggagggctttcagaacagggagcctgtgaagtttggagacagagtcctggtgtggatgggggtgctaccatgacctcttcagttcttctagaccaacagaagctcttgaaactgtgcattgagcctaggaagggacatgcctttattttgcacttcatagattttctttttgagacgtggtttcactctgtcacccaggctggagtgcagtaatgtgatcacagctctttgtagcctccaactcctgggctcaagtgatcctctcactttagtctcctgagtagctgggactacaggcacatgctgccctgcctggctaatttttgtagtttttgtagagacagggttttgccatgttgcccagcctggtcctgaactcctgagctcaaacgatctgctcacctcagcctcccaaagagctgggattacacatgtgagcactgcacctggcctgtggacttatttttataaaaggaatatatattcattatataaaaatctagaaaatattgtataaaaaattagtggtaatcttattattcagaaatgaccactgttagcatcatatgtgtgaatacatatatgtaaatgtatatatgtacatatgcacatatatctatgtaactgtagatctgtacctgagtatctatattcccatacttttttttttttttactttttgagacagagtcttgctctgtctcccaggttggagtgcagtggtgcgatctcagctcactgcaacctccacctcccaggttcaagcgattctcctgcctcagcctcctgaatagctgggattacaggcacccaccaccatgcccagctaattgttttgtatttttagtagagacagggtttcaccatgttggtcaggctggtctcgaactcctgacctcatgatccgttcccccttggcctcccaaagtgctgggattacaggcatgagccacatgcctggcccattctcatacatattttaaatgtacacttaagtgaaaatggtcttgagcaattcaaacagtgtttgacctatttttttcacacaacactctttcttaagcatccttccgtgtcattcagtaaccctgtctctagcttttccattactctgcaaagctcattttcctttcttacattctttcttttcacgttgcttgtgtattataccatttcacttggttaattcagaatctaatccatttgccccaaggctgcatggcaaaagggcaaagtatgcatttataaaatgtgaatgagcataaggaagacacaggccagggttgctcagctccttggcccagtaaagctccctctgtgcatgttttcagctcggctttgttcagggagcctctggtaggggaacttggcagaagccaagccaaccttgtcctgccggccgctgtagcagccgctgcatccattagcaattatgggtcatccactgtggggcatttcagaggcctgagggacacagctttgccatgagcagaaaccactgggtaagccggaatggaccaatgaaaatatgtaatcttgacaacagaatccttgaacatacgcacacatacacacctacaaatgctcacagagtgcaatggaggcagcggaaagcagtgactacgggtgaacactctgggctaagactggaattggagtcctagacttgagactttctttttgatttgggtgagtcacttaaactttctgaacttctgctgtcctcatctgtaaacgtgaatggtgctcacgtgagaaggtattgagagatttgactgggattacatatggaaagcatttggcacagggactccacgtggtccatgctcaggaagtggccaccactggcttagttttagggatctcagaggtgggggaaaggcagtgcttctggtgtgggggtgtgtgtgtgtgtgtatttccactcatgaggtacctttcctttgatgaacatataatactttatggagttgtttttatttaatgtctgtgtgaagcacaaggaaaagatatagccctgctggtaaatccagacccagagaagcagcgtatgtggaactagtggagcgtgtactacaccaatagtagggagatgcagttcttctcctgcctctgggactgcatggctgtgtggccttagctagtcacttgttctttctgatcctctcttctcattacttggaataagccagctgattggaacacctcattgctaaggtctcttctaaccccaaccatccatgactctttaaggtagcagtggctaggtccttgggccttccttgaatgttcccctaaatctggagagtcatctctgacacgttaaatgtagacagtcaggccaatactctccagcacctaggagagctgcagatggtgcctggaattggcaacgttaagaataagctggggacgaggagccgtggttgacaatcaggtccatggcctcactgggttgtgctttctctctctaggtgtagtttagtttgaattatttatgatgatactttctagtcatttgggaagatgaatgaagtctcagtaatcagagcccatgcacagcctctcttaactaaagtgaattgagacatcaatccatgaagagggtcaggactagagaatttcagggcttgcccccaggatgagccacagccagcagagtctcatcaagcaaagggacagcccaactcgcagaagcagagtaagggtgctctgtcttctaaacataaaaggacagggcagtagagaattaactccttgactctggcctcttagcccttgcaggtgtataacttgtcccctctgttctcctttccatctccctgctgatgccaatgagatgtttaggaatgccttctcctcactgcccctgaagtcatagtttccttgagctcagcacacaggattggcagtaggaagagacaagagagcatgaagatgtgatggctcaggctgcagaaaggactgggagagggcagacagccaggaaggggcagacacacacacaatttgaagtaactgaacttcagtgctgatagctgggaagtgccaccatcatgaggctgtcaagggcaactcactgaaagtcaaaacattgtgctgatgacagagtgagaagccagcagctgtaatctttagcctcgtgaaagactgttaaggaagcccacacagcaaggaaaaagtggccaaacattttcaagacatgagctcaggttacagtcggaaagataaacgttgttctaaggaaatgtgcatcttcattagagacagtagaatggatttcaaaaggaagctgataaatgtattttactttaaaactataatctacccgtgtccaaactggaaggaatctcatgcaacagttctagacatacctgcatgcagtgaaaagtcgtcatctttcaacgtcaaaggtggatgtgtccctgacgtctcatccaccttgtcatattgaaaccagtaacttagtgttatttgtagtaaaatattctataaagtggtattctctgacccaggatcagctctgcttttggaggcaaagcagatgtcttcttccagatgcctggctatttgggggaagaggaggtcccttatagcaagaatgctagactcaaaaggaagtttagtagcacagaaaacctaagtcagtggccagttatacagaagaatgtctctagtgtagaattgtccattggcatcccatggaatggattcctggttgtgctgctccagccacaacctctaggatatatctagagtctcctattgccctttggctctcaaaatgtaaggagcttgttatctctggttcaggtggggactctgtgggggaatgggaggctattggaggggtttccatatgccttaacccctcgctttcatgtggggatggcttatagcatggcactgaagaactgtgccctttcaaggtcactgtcttctatgaatcccctcccagagtcttactgagagtggatgactaccacgggtagatgggattttgatccaaagaaggaaagaagtttatatgtttgaacaatctaaggtcttttttgactgttaaacctatgggcagtattgaagctgccccatctttcgccactctggtgaatcagaaaaaatcatgttcttctctgcctctctcataccaatcagatatctgtccgtcgttgtgtgtgtgtgatttattttaaggaattggctcaagcagtagtgaagcctggcaagtttgaaatctgtaggacaggctggcattctgggaactcaggcaggagttgatattgtggtcttgaggcaggatttcttctctgggatgcctcagtttttgttcttaagaccttcaagtgattggatgaggcccatttatattatcaaggtaatctttacttaaaaccaactgattgtgggtactaatcacatgtataaaataccttcacaaggacacctagattagggtttaggaaataagtcctaccatctagccaagttgacacataaaactaaccatccttgcctaacctccttgagcctacgttcgtcatgcataaaatggagttataatatctgtaacacaggttattgtaaggattaatgtattgacatccatgtagttcttattctgtgcccagtaggtactttctattaggctgtttttcgtattactaccaaaggctgtgagtcatatggcagggaccatcaaaacgccttcatcaactctgactggagggtggttatacctttgtgcaacaggccttttgagctaatagagacaggccttgaagggtggtcggattctggaaggtgatcctcttggtagagttggagcatttcttagttgattagaggatgctaattgaaattcagctatggtagaatcttcttggggagatttcggagggggatggcacattcttttgggaatcttcaagccaattcttccttccctgtgtctttttttaattatcatggatatataatagttgtacatacttatggggtacatgtgaaattttgatacaagcacgtaatatgtaataatcaaatcagggtaactgggatatccatcgactcaaccatttatcatttctttgtgttaggaacattccagttccactcttttagtgattttgaaacaggtaataaattattgttaactgtagacatcctattgtgtctactgaacactaggtcttattccttctatgtttttgcacacattaaccattcctgcaagtttctttttcttttgtcctttccaggtggcctaagtatagaaagattgtgtttttttggtataactaaatataccaaaaatatgcttaattcaaatctagcaattcatgaagaattagaagcaccttctagaatgcctcttatgctggggacatcatcaagaaccatctcttgcttcttctgtcagcatcttcttcctgtaccatctataatgctgttgcataggaccaggggagatgctggcctgaagcaggggcagaggtcactgtggttctgggcaggtccttgtggttctggtggttggggataccccatttccgcttcctcttttcagcctattttatttttttattttattttattattattatactttaagttttagggtacatgtgtacaacgtgcaggtttgttacatatgtatacatgtgccatttggtgtgctgcacccattaactcgtcatttagcattaggtaaatcttctaatgctatccttccccactccccccaccccacaacagtccctggtgtgtgatgttcccttcctgtgtccatgtgttctcattgttcaattcccacctatgagtgagaacatgtggtgtttggttttttgtccttgtgatagtttgctgagaatgatggtttccagtttcatccatgttcctacaaaggacacgaactcatcattttttatggctgcatagtattccatgatgtatatgtgccacattttcttaatccagtctatcattgttggacatttgggttggttgcaagtctttgctattgtgaatagtgccgcgataaacatacgagtgcatgtgtctttatagcagcatgatttataatcctttgggtatatacccagtaatgggatggctgggtcaaatggtatttctagttctagattcctgaggaatcgccacactgacttccacaatggttgaactagtttacagtcccaccaacagtgtaaaagtgttcctatttctccacatcctttccagcacctgttgtttcctgactttttaatgatcaccattctaactggtgtgagatggcatctcattgtggttttgatttgcatttctctgatggccagtgatgatgagcattttttcatgtgtcttttggttgcataaatgtcttcttttgagaagtgtctattcatatccttcgcccactttttgatggggttgtttgtttttttcttgtaaatttgtttgagttcattatagattctggatattagccctttgtcagatgagtagattgcaaaaattttctcccattctgtaagttgcctgttcactctgatggtagtttcttttgctgtgcagcagctctttagtttaattagatcccatttgtcaattttggcttttgttgcaattgcttttggtgttttagacatgaagtccttgcccgtgcctatgtcctgactggtattgcctaggtttttttctagggttttaatggttttaggtctaacatttaagtctttaatccaacttgaattaatttttgtataaggtgtaaggaagggatccagtttcagctttctacatatggctagccagttttcccagcaccatttattaaatagggaatcgtttccccatttcttgtttttgtcaggtttgtcaaagatcagatttttaaggtaggaggagtttataatttgatgggacagagccccaggcattcactcagagggtcatgttttcaagtgggcaggtttcctttgcctgaaaggtcagtacccatgcagtatactttttcttatgcccttcttctgtgacatcctggctgcatgtctctttttgttctctgcactgctgtctgctatcaggtgggtaaattagctgaggcttgcttgaattcacagaagatggaatggtaaactctgtttccgccatctgaggtttaccagctcactactgggagttgctggctgccagctcagttgttaactatgtaatacttggttccccccagccagtattttctgcatatggctctccagatgggagccctgtggagaacaggggtgttgggaggatcagtccttttggctgtttggttataacacacttgtaatagcaccgaagcctcttgcattgttctttggagcagagcttgattctcattttgcttctttgctgtgtgtgtctccctttcacaacagaatcttaggaaagcttatatctgaaaggtggccagcactggggccagcacatgggggttttagggaacacaggagtgaggagtgagcttcaaggaatttgatggggaaacctttatcctcatcactggaagagtaattcaagcttaattaaacaagcttaaacaatctgtagtttaagctttgtctgtccattgctgcccttggagttaacttttaaccgtagagtcctcaaaaggccagagaaggtgcaaagtatccttgtcaactccatgtccccctccccaaatcctgaagccttttcagtagatgtgtgtggggctagtccatgctgtcggttatctctaactatgtgaaccgccccaccatagcgttcaatttccagttttaatgtttgttttttgttcatgtgagcacttagtaactattaagtcaatgtggtcatagaataaaagacagttgcttttaagtttcccccacccctgcttttggatgcagaattggagactcagagagatcaagtgacttctctgaggacagttttgattgtggcagacccggctagcacccaggctcttagctcccgatgccatgttcctactgctgtggcattttgcacttttatggacttaagttctagcctctttgtttcatgaatcattaagagtttcagggaatacctggccaactaagggatgagatcagtcagtaaaatgaaggatctaaattttgaatccatgttcctgttcataatacacgtctttgcagtcatttccccttgtccagcctctcttgatgagagacttttttagcttttagcaggtactgtagccaaagcaccttctctcttccatgttccttctccaaatcatcttttttcttttcatcagctggaccatgttttccttttcccttccaaagtcagtcgtgctccacattttgacggctttccctggttctgtgaattccttccaagttgctgccatctttctactaataagctgcccaatacactgtaccggtcacctccctggagcctctcacagcctcctggatgatcttcagcctctattctggaaaaaccaaggcttacacaccacccactacaatgctctttcagccctgtgctctccaggtggccttggctgttacatcttgtcgttcatcacccctaccacctttgcaagattaaggtgaggtatatgagcccttcgctttgggcaaaaaatttaagagggtgccacaaattaaaaaccccagtaatcaagacttttttaaacctacagattttttgcattaattttgttttcatagcatatcacattacagtattatctctcttgattactgagtttctgagcagctcccttgattttgggcccaagatgaatgcctgtctttcacactccatctctcccatgttcctttcctcttggttttgctcctccccatccttttctgtaattcctctagtcttctggcccctgcggatttattccttgtgaattaatgttctgtttacatcttcttccagattgttaataaagatgttaacacgttctctaggcctcactccaacctcgccatagctggcccgctatctggggccctctgctcaagaaaagaaactgcattttatcataagttctgttgtttaccgtctcctggtgagtatttccatcccacccaggttgctgttatccttgtccaagcgccttaatgtctcatgcgcgaggcttgctgaagctccacgagtggcttgaaagataagcccttgtaaataaagcttatgatccttgttaatgttgggagctgatggcatgcgtagtccagccaatttggattaattttccaagggagattttggtagatgctacgtcaacagattctctgaaatcccactctctcaccttgcctcccttttccttggccactcgctcgtttttgccaattaagaaaagatatcacttccgtggtggggtgtgatttactctttataaaccccggttgctcttccgtgctcaaagtccacttgctgcttataaacagtgcttttcctattggccttatcctttcagtagcagcttgaactagatttacctttgtttctttttgtcagaggaaaagatagatttttataacataaatttggcaaaatggaaggacactgtagaataaaacatcctttgcaaaaagtacacacttttagcagttcacattttttaaagaagatagtcgttttcttggttctctgttaccgaagtagcaaatgtccatgaaactaacttgggaaatagagaaaaacagtaaatcacccttgtgctagcaccccaaaataaacactgtttacatcttggcacctttccttctagtccttgttacatatttatcatgctgtagatgcaattttgtgtctttactttcacatagtatatcataaatagtctccatattattatgtaatcattataaccatcgtttttaaagattgcgtgcttttcaatccaagtaaatctgtctttttaaatttaatcattccccgtttattggtcacttaagttacaaatactattatcagtaacaatgaggtgaacatctttgtatgtatgttttccttagttaggattatcctataccttagattcctggtggtggaattactatattaagcgtgaggataaacatgttgctaaagtgtgttagagaagagtttgaccaatcaacaaagcctctatcagtgtatgagactatctcttcccattcctcttcttgtactgtgtaaaaatagttcttatcagtgcgttcctgtcactctaggagttactcaggtagacatatacataatcacactcttcatagtcctctggtacatttgtcatgctaacagcattaatgatagtagcaataatatcccaactgttctctgacacacctctttaaccagcactgttcaatagaaatatattccagccaaggatgtaacgttaaattttctagtagacatgttaataataaaaagacataggtgaaattgattgtaatactatattttatttagcccaatatatcagagatgctatcatgtcagcctgtgtcactagccaagtctcaggtgctcagtggccacatgtggttagtgaccactgttgtggatagcacagctttgagccataagcctaaagcactaccagactctcttcttttgtttagaaaggctgtcaaatccttctttgcttttcaatcttagttttggttctccaaaagtcaactctgagataaggacttgatgtgcaggtaatttatttgggaggtgattccaggatgcattagggagcaagcgggcaatatgaaagggagatgataaagtcaagaaagagcgtgacagtgagtggattgctgcagtgggtaactggagcttagtcctgctggggaccgtctgagaaactgggtggcacctgcctcaaagttgctctccactgcagatgcagggactggaacatgtatttagtgactcctgtcctccattaattagttatgggttgttccagtggtattaattaccccacacttctgggttgtacctgcttaaggccaagcttgctcttactgtgctggagaaagtccttaggcaaagaaaaaggatgcaggctcttgaggtgggtgtagtttgggggctgaactgcctgctgtctttgccaggagactcaggtgggccagggatatgagtggggcctcagcagcacctgcctctgggcctgtgtcatggtgaagtagggtcttctccagtggggcttttcccaaccaggtcatccttggttgatagtcatcgtgggtgattcagtccatattcttttatataagccacagaaactgattctggctaaccaggcaaaatgtaaatgatggagggatgctgggggctctctggatgtaataaggcctggaggagagggctggtcaggattggggatgggagagaataagattttgtcccatgctggaataaactggcaggacagttagcatctcggagaacagcatgattaggatgccctgtgttccctccctctgtttgttctggggaaggaaatggggagcaaagtcactttggcttccttttagaggtcaccacctaaaattattttcccatttatactacacacaatagaagaaagataattccttgatagaaaatcaaatcgctgttagggaatgaatgctgggctgctaaaaatggacaaatgaccactgcagaaggagattgggctttctggtgaaatctgagtaaaattgggctgatttcctggttttgataatgtgttatggttatgtaagatgttaccactcagataagctggggcataggtacatgggacctttctgtactatttttgcaacttcttgtggctgtataatcatttcaattggagtatccaagcttcacctttacgccctacctcatcctccaaattactggtgctcaatctttagacctaaaggtactcctcaaaccttctaaacctggggagggttatgcacctatttatttggattcaactggttttcttgctctggttaatttattatattttttggagtttatatttgcagatttgatgttgacctgcagttaattgtggaggatagcaagcaggtctgaaagtggactgagagttatacaaaccctgctttcctccttctgactccaagcaggtttcccaaaaatgccattgacaacattgacaccctgtaagtgagccatggttcaatggagaccactcatcgctgatcagccccagaaactctaggaagggttgggtcatccagttcagaaagctttggctcagtcctttgatttctgcaatgtacttggtcagatatatctcttggtgagaatagagtgggctaaagccatctttgttgagacattttctccaaatagcagccatttctttatgtggctttccaaccagggcatattctgagaagactattaaattctcacatgggaccattgacttgaaggcagtcaacccctagagaacacaagctgttctcactcttccttcttgcagtgattgaatgtcattgctgccaaggcagagtctgggctcacgatcacaggtgttgtggtgtccgccagagtgccatcaatttggccatagccacagctcccaggtaatgggtattggaagccattgcttgtctaaacaagatctgtgagacttccatcctcagttagctgttcaatttctactaataattctctaataaacatttggccaatcagattcagtctgttacgatggagttaaaacagcttaatttaagcaataataataattgacagcaacaggaaacactgagccatattcttcccactgtctaagtcattccctgggagtaaatcaagtgtttaaggagggacattcacgtctgcagggcactggggccttgctcagtcagctagggctgtagacatcagatggtccccaggccatggcttgcaaatctgtgcatggcccagccctaggagaaagcccaggctcacattctacatgtcatccttcttcccaagaaggctgagtatttcatgagtttcatgagtatgatctcattcttccttctcagctgtctctggagggtgggaggggtctgctttggggacgctgctggcagacttctttttattctttttttttttttttttttttttttttgagacggagtctcgctctgtcgcccagtcgggactgcggactgcagtggcgcaatctcggctcactgcaagctccgcttcccgggttcacgccattctcctgcctcagcctcctgagtagctgggactacaggcgcccgccaccgcgcccggctaatttttttttgtatttttagtagagatggggtttcaccttgttagccaggatggtctcgatctcctgacctcatgatccacccgcctcagcctcccaaagtgctgggattacaggcgtgagccaccgcgcccggccgacttctttttattcttaagccccttcctgcagcccacttcttccaaaggctgcagcaagaagagccccttccactggctttttaaagacttgccaaggagccacacagtgtgcttggggaggagtgagagtgcatcccctgtttgtattatgggatttggaattagggagggtttaggtcaaatcctggcaccaccacacaggtgaccttgctgaggctgtttgccctccccaagcctcagtttcccataggattggggaaggcaataccacctcgtgctgttgagacagtcaataattgataacaacatgtacaagataagtagaaagctaatatgattaatattaactttatagcaacccccccgcttgaggcccacagagagtgttacaacccctgcttgaggcccacagagagtgttaaaggaatccttactgagtccaaagaaagaaccctgtcttctggtccatagtgctcatggcagattatgcccatgctgttgggtttgcactgctgattcagggatcagaccacatgttcttcataacaatgatcaggtgcatcattggagacaggtatgctatggcagaaataacatgactttgagatgaagacagagcctgtctatttaaatcctgactgccatttatgagctgtgtggtctggaatgggtttcctcatctgttaaggagagaaactgacacccatccataagcatgagaagaagagtaagtgagcaaggctgcctggcacatagcaggtctactgtaaatgttcctttcaaatcctccccttcctgctttctaatcatgctaccctaagattgaaactggtggttataggagaatatcatcccttcctttcttccttcccccctccctttttttcccactccctgcagacagaattggcattttccagaggaagaatagatgtttgattttgtgatccaaattgaagttcctctttgccagaaaacacttctccatatgtttgagattccttattaagggaaaaaaattcatgtttacgttgaggtaaaaatgacacttggttttaccttctgtggtaggcagaataaggttgtctccccaacaaaaaaaaaaaaacaaaaaaaacaaaaaaaaccccaaagccaaaaaaaaaaaaaccagaaacaaaaaatcaggtcctaatccctgaacctgtatatgtcatcttgtacagggaaagggtctttgtagatgtgattaagttaaggatcttgatttggggagattatcctggattatccaggtaggtcctgaaggcaagaatgtgcatttttgtaagggagaggcagagggtgatttgaacatgcacagagaaggcagtgagacagagatgcagggatttgaaggtgctggccttgaagattggagtgatgtagccacaagccaaggaatgccatcagctgctagaaagaagctgaaacagacaaggagcagactctacccagagcctccagagggagtgcagccctactgatgccttgatttcagaacagcaatactgattgccaaccttgtgcctgcagaactgtgagagaataagccactgagtttgtgggaatttgttacagcagccataagaaatggacacaccttcatactattgggacaaacctctggccagtctggcttgtggccacatttttctgagagagtcaacaccatgggtacctatagatgccagggggtgggaatgcaacctaccagagatttaaccaagctctggtcctgtgtatgggctctcacctgccaaaggtgcagcagttgcttgtatgtttcaggattaatgatcaaaggcagcaggtctgataatagggcctgacttttgtggccatgcagtcggagccttgatgatgatataagttaaggagcttcagtgactagagacgtggcccagccctccaagaatgacactgagcggctgagatagccatcatatttcatctgatgtgccagctctgattgctgggggagttgccaggttgttgagaagcttgaggctgagactaagctgcaggcaaagtagaaacaagctgctcaagaacctgtgctttggtgctgctgcacctatgtaaggcagaagtgggcttcagagccatggttctcatttgccttgttgtgatgtgtgatctactgtgagatgggttgcaagtaatttgttaccaatattaaaatgctgccttttgcagaagatttacttcttttaatagattggggcagattcatggtggttttgctaacttgcattctgatatgtgttcttgagtagggcagaaaggggtggagttttagatagcacacaggaattgctcataatcttggggacactaggctggcaggtgagtcatggagataaaaagtgtctgagagccatgaccaaggaacatttaccgcttccctcaggtcgacaaatatgggtcagatgtgtgtcatctcccacccttgtgtccatggcagacatcactaattgatgtgtgtgatctccctactcttgtgcccatgacagacatcactaattgatgtgagtgatctccctacccttgtgcccatggcagatatcactaattcatgtgtgtgatctccctacccttgtgcgtacagcagacatcactaattgatcatggcactgttaggcttgaaatcaggcacagaatacttctcaacacagtcatttggttgtccactgccatttgatcaatgggtaagaggagagcagaggaaacgataagtgaaggtaaaagtagtatgagttttgtatttttgaactgtcatttaatttttatgttattggatatgggaaacagtattaccactaccagttgatcagggttgacctttgacatgacatacatttgccattcctgctaattccttccccagctttaagagaatctgccctaattcccagcatttttgctggtctttcccaagtttcttttggcatccgttaacaaaaggtctaacctttttcccctttcatcagtaaagataagctgcaggtagtaaaacgggttcccaatttagcatggctcctctttcagagggcagacatctaaggagaggtcagccgctccactcccctagcccctgactttcctctggggcccagggttcacacaggagttacagggattagatttagaaatcagcaactctcctaagatgagtattggctgttcttttttttgaaggtgagagtcttggtcagatggcttgagcacgcatggccgtgcaccaggttcccagaggcgcaggcaagagggctgcatccaagttgtcctggaaaccgtgctttttttttcacatttagggctgaaggccagttgcttgctgcctgggtgggggaaataggaaggagcagccagggttcggcccctgggcagaaggatatggtgagattaagagtgggtcaggggttgtggggtaaggaggattgagggaggaggaggtgaagatgaaatgcaaagttgtgtcttagaagttactggcaggttggcattgtgaacttgttatctgtttgacatgacaccccagggagtggctggagagacagcagctgtcacggtcatttctggaggaggaatgactctggctgaatttgcattaaggatttcctaccagggttgccaagtgattatcccatagggagattctgagatctcactctttctcctttttgtatatatttataggagaatgcttatctacgttgcctagggcacgctgtcctttctcccttcctcccttccttcattccttttctccttccttcctttcttcagcatttttgagcgtgcactgggcaccaagtactggcttacataccgggatttggcaataaataaaacagtccctgcttttgtgaagcttacattctggtggggaccgaggtggggagcaggagagacaaacaataaacaaacaaatgaacctataacatggcaggtagtgataagtgctaagatggagaagactgaagataagagggcacaggctggtggagagggctgggaggtctttgggatgggaaatctacttgaatgagtgcaagccgagcagagaggggagggcttcacagacatctcggggaagagagttcctggcagagggagctgctagtgcaaaggccctgagatggaactgtgctggcatgttcaaagagcagcctggaggacagtgtggctggaccggtggtgcaggggtaatagcagattaagccagtgagtttatgcagggccaggccacatagggtcttctaggctatggcaaagaccctggcagccatttaagcaggtggggagactgtggagggtgtaacgcaggggagggcatgagcagacctgtattttagaaggggccactctggctgcttcatgggaaatgagccacagggggccagggtggaagcaggaaggactgctgggtccagtagcacaggttgtgccctgctcaagagtacagagtcaaggctggaaggagggtcaggaggctgtgtccatgcaaggggagcatctttctggaattcatccaaggtgccctaaggctaatgggactcagctagtttgtaaactacttttgctacttattaatatgtcatagacatttcccccatgtcttcaaatagtctttgacaacatgctttttaatagttgtgcagtattacatcacttggacgtactatactgtaattaatctgccatgttagacattttacttattcccagttattcactattttttaaatgtgctgatggatgtcattgtgcataaatctccacgtacatctctgattatttccctgggtaatatttctagaaatggaatggttgggttaaataagatgcatttttaagcctcttggttattaaattactttgcagataactgagccgaggcttaagaagggtgagtaactggcctccaggcacaaagccaggaagtggtagggcaggatttgaatgcaggcatgtcggttttgagatttggagatctatcttctcccccaccgcccccgtcataccacactaaggacagcttagatgtcactcaactcacactcagccaaaggccaggtagcctcagatttggtggccttgatgaagatgatgatgatggctgaggagttgaaactagtcagctttctttaatcagctctgtgtcaggaactatattcagtacagattgtgcatattcccactggaccctcagaggaacctaagagcagtaatatttttagttccattttatacctggggacactgaaggtcagagaggttaagcagcctacccagggtcacacagctggagaacggggaagccaggaatgagccctgtgtaataccttcattcttaaccattcccagctatagggccttccaagataggaactatgcccactagtcccttgaattataaatactagctcatataggctgctgattcacttcacagtccacatttggtctgacagcttctgcactcttgcagctttaaaaataattgttaccattattattaccatattacttctatgactatgtattatatgataatggtaatatatatgctggtatatgcatagtattatatacactaaccttatatatattacattactgttacaacatgttattacaattactactattattgctgtacatcattactatgaatactatattattaccattcccatgctccttgttgctcattctggtgtccaggtggaagggacaagaccacgttttcctcatagcagagtgcaggggcaaaaggatgagcaaaaacatctcatgcctctgaagttattgcctcatgacattattctaatactcatagcaacaacaactattatgattactatgttaaacataggagctgatagttccacgccagctccactcagtcttgctggcttttctctcaacaactccttggggtagatacttttattgcacccattttacaggtggggaaactgaggcccagaaggtttcatgacttattcaagatctcacagcttggcactgacatattttttaacagctttattgaggcttgatttacacacaatcagctggaagtattcatttacttatttatttaaggtgggaacttgctgtgtttcccaggctggagtggagtggcgtgatcttggctcactgcagcctctacctcctgggttcaagcaattcttccacgtcagcctccctagtagctgggattaatagggcatgccaccatgcctgacttattttttgcactttttagtagagatgaggtttcaccatgttggccaggctggtcttgaacttctgacctcaggtgatccacccacctcgacctcccaaagtgctgggattacaggcatgagccaccacacccagccagctggaagtatttaaagtatgatttgaggttgtgacgttgcatatgccagtgaaatcgccaccactgtcgagatggtgacatctctggggctctggtgctgatgcaggtatgaccctttgtgggaagccctcataagtccatgtatggtgcctccttcagctctctcacccatcccattgatcccaagaggaaggtctcagcatctgctgagctttctcacaggtaatgttcctgcctacactctcttcctcctgtccccacttgcaacagtgctttctgtggctaaggaccggaattcatgaggctgagtgacagtggaaatttattactgggatggttcctctagcaagaggggcacagtgggggcaaaatgcaagggagatgggacctagacagcagcccctcccgagagacctgccggacactcccccagggccgcttgcagaagacagggcagggagaaagacctagtggagattgtcctccatggagcccctccaccttccactctttagcttgtgaaccttatttactctgcagtactgttctcactttcacacacgcatgcgtttcatgactccctggggtacccactttgcttctggggagcttgctgtgtaccgttaattgttatattcgcctcacatcacgcttagttaatatttagataaactgtgtgagcaaaatgattttaggttgtgtgtgtgttccactgctggaaacctctctgtgacccaatgcagtgatgcacccgtttttgagctgggtccccttgggtatggagaggttaagtaactgatgtcaaatcacagagcctggaagggcagagcctagaaggaggccatgacttttattcaattaggcttggcccactgaaaagctccctccttcaggcatggagggtggagagctgcatacttccaggtgaagagaaaaactagggtcatccaccacacaactgccccaggctaggagaggatccctcttgctacaataatcgttcctgaacttgtctgcccattgaaaccacctgcgtactccaaactgcactgaagcatggggcccgtcgctagacattctgattttattggtctgggatgcagcctgggctttagaatttttaaaagatccccaggggattctaatgtgcaaccaaatttaggtctagagtctggcacagtgctgtctaatcagaatacgagagagccccatacatactttgatgttttctagtagccatgtttttaaaaaataaaataaacaggtgaaattaattctaattatgtattttagcccaatatatctaaaatactatcatttgaccatgttattttaaaaattaatgagatgttttaaatcttttttttgctcatggtaggtccttgaaatccagcatgtttttataattacagcacatctcagcttagaccagccacttttcaaatacacagtaattgcatgtagctagtggctactgagttggacattgcagatcgggcatatagtaagtgctcaatgaaaaatttttgaacacttgaacaaataatggaggcgtcatgtgcaatatctgcagtcgtgagactgggtaactgttccaaaggtaggaaggtgtggtttcttggcagagtcctctctagagaacggttctggttatgtcttaggatccaggcatcggacacctctcctacctatgaagtcttcatcagctttgtcctgctcctgcactctgctccatgcattggtgacatatgcctcttagactgtgatgcctcgatgccctaggctcattctgtcattgtcatcatctgtatcacatactatcattttctctttatgtgtctgcttctcatatatcctattagctcctcaaggccctagccatgtcctcattaatctctgtatccctattggccagcatttaatagatgtttgtggaatgaagtaataaacgaacaatcacatggcgaggagatttgactgtcatcaagcccagttttatagggcaagactggccagcgcaggtcttaggtggaaggcagggctggctcaatgcatatttgtagtctggttattagaaattgtaagcaatgtatcttagttagcgattactgcatactgctgggtaacaaaccaccccccactcagtcttttctgacaagcatttatttcttgtgcccaggcctgtgggttggctgggtttggctgattcctgatgtgcttggctgagtttggctccaggcagtcggtaaggtgctggtgtgccccatgtttctcattctggggtgccggctgaaggggcagagcatattcttctcatggcagatggtaggcatgcaagctgatgagcagaaacagtctgtacctcttaaaaccttggcttggaacagtcactgtcacctcccttgcatttcattgcccaaagcaagtcactgggccaagcccagagtcagtggggcagagacatggaggggcatgaatatgagttgaacaatcatcccatctattactctaaaatatggtttcctggctaagggtgatggtgttcctgcctctgaaaacccatcccttatctaagtggttattgacttcagcctgtttctcaacgtaggaagaaaggtgggtcagggattttattaaccatggttgcttggctgcacccaggctgtttctgttttatttgacattggctatcttgttttctactcttttgaccctgggaattggttaacctaagaattcatgctaaactctcttcttgctcttgagggaccagtcaaatcagtccctgatatataggttatcccagctgtgcagcacatgcagattgtgtgaacacccatgcgggcgcatgtacatactatggttctacatgccccttgtcaaagggaggatgtggctgtccagaggctgaccagagcttacagtggctctcagtgtgtcctgctcagctgtgcacccattgtagagttgcctgcatgagaagccttccctgaggtttaagaaaatggagcactcatttactgtccccttggtaaccttcagctctactgggctggagggcagggggacgtctttgtgcagtgcagctgcagaggagactcacaaggtgagagggttgggggaaaggagacgtgaggctggagcagtggtcattcttccagctctctggcttggaccttccaagttcactgccattccagagaccttgccagagtccacagttgagctcagaccagggacttcgggccatttccagaggaacctgcttgcagcattctgttttgagtgaagacgctgcttccaatgaagcagaatggaactcctggcttgcctcctctccctcctgcagcctgcaggcctaagtgggctctgaggagctcagtcttggctgtgaacaggagaacaattttaccctgaactagcctaaccctgcttctttctccagtcttctcctggtcagatttggctgcttttagcatctgtgtctcccattggggtgcaggggagtgagggggcagtgggacatccttttagttggttggggtctctggggaagcaggagctttgaacgcagtttgaacccctgagcgctcaagttccttttctcttggcacagtatgatttcctgtttcgaagaaaaaaaccccagagttttaagaccttaaaaaaaaaaaaaaaggcacttggacatgaaatggctcttacaaaacagcatgttgatgagttaagtataaatgaatcagagacatatggattaaattttccttgcaatccacaggggctttaaaattaggggaagagtgtttgttaaaacgtgtgtgtctctgccagggtctgggacagaattggaggctgtgggattgctggagaagccttacacccctcccctccccaactttccctaccgtgataatagggcttggagccaaggaagttactacaagtcttaggttccttcttgtttactcctcaagcctaaagcccttttaattgcttttaattgaattgttcctcatatatctcccctgtgccttcaaatgggggaacaggccaacatctaactcttgcagtgactttgagccagcggggtgaaggcaattgatgtgagccacaatgacatgtgagatattactgcccactccttcttgactatgaactgtcccatcttggcccatactgtcttaacccttccaggcaacacaaataatctggtgtggttcagacacgctattagaaaactcctggccgggcgcggtggctcatgcctataatcccagcactttgggagactgaggcaggtggatcacttgaggtcaggagtttgagaacaacctggccaaatggtaaaaccttgtccctactaaaaatagaaaaattagctgggcatggtggtgggtgcctataatcccagctactccagagaggctgaggcaggagaattgcttgaacctgggaggcagaggttgcagtgagccgagattgggccgttgcactccagcctgggtgacaagagggagactctgtctccctcccaaaaaagaaataccactcccctctctcctgtggccaggaacagaggaccgtgcaggggtggagaggagggttggtaacttctgttgcagatctctgtgatactattcttgaaatcaggagaaggtgggagctgcaaagtcttttagtctcctggtaggaataaggacaccaaagggatgattggtttttcccacccgcagtcatccagacattccaaagtatgttggccttgaagtttttatccttccctcttaatttttgaccaaggagcagagaaacactgtatatttggagaaaccctgagtaagcttctctgtgttgttgttttgcctgagagccttttgggcaagagaagtctttgtggaagcccctgtgtaaaagagataaagagctgaatcagataaatcaggggtaaacatctcccggccccagttagaccccgattccgtttccttcccggcttagtgggacctgtaggtctcttgggaacacactctgcaagcctattagtattctagagtaggaatcactacattctttggctcttagctccagcagcaaaattaataagtgtctcatggacattatgttgagtgaaagaagccagacataagagagaacatgcaatgtgattccatttatatgaagttcagaaataagcaaaactaatcaatgtggatggaagtcagatagcagttgtttctgataatgattgggtgagagcatgagagaactttcttgggacactggaaacgttctgcattttcatctgggtggtggtgatacaggtgtacacacatgcaaaaacttcctgagctgtacacttcagatcagcactcattgcatgtatgtgatctgttcattaaaaagtaaaaaattcattctctcttcttccccgctgctgaagtctgggggcaccatggtcaggtgaacctcttttttttttttttttttgagacagagtctcactttgtcacccaggctggagtgcagtggcacgatctcggctcactgcaagctccacctcccgggttcactccattctcctgcctcagcctcccaagtagctgggactacaggtgtgcgccaccacgcctggctaattttttttgtattttcagtagggacggggtttcaccgtgttagtcaggatggtctccatctcctggcctcgtgatctgcctgcctcagcctcccaaagtgctggaggtgaaccttttagagtctgagcttggagattgttgtaggaatgagggcagagcccagggggagcaaggcataagaagggttgcccttggaaagaaaaagcaaagcagggttttggtgacacagagggccacagcagagttgagtgcacctgaatgggctctgatcgaatggcctcagcctcatgagaaatgcacagtaaggtggttggggagggtttggcagggccctggaggttgggggctgttaccatatggaggaacaagcgggcatgggaaccagccctgtctcaggtacttcagccccatttatggagagaccacttttgcccctctctgcgccattttgacatgaagaggattctgggggctcagaaggaagggggcactgcccacacagcccttgcctcctaccctttccgattcagagggactgggcgtgttggaggcacacagaggatggagtgtccacgaccagcccactaggattccagaaagggcccatgcctgtcataggcagttggaagtttgcttgaagagatggaatgagacttgttgggctagcatgtctgggctctggttgggaaacatggtcggtcagtgggattgaggaatgtggcctggacaaaatgtgacggcagtttgcatagttctgaggcctggatgggagtggtggcaggggcgcacttggggtgtcctggttgtccagcaggtgtgggacacatcccacctgtcccactccaccccatccttctgtcaccttctgagcctaggtactggtcattggatccaggccctaaggctttctgtctcatttctagggtccatatatggaggcctcaatctcagcctggccaggcacactcacgcaggagggagatttcaacaagctttgggaaacagttttctttccaacccaagcagctgccctttgccaatctgtgctagaagtgaactatacacagctctgtttaagaattccccttccagctaattcatcccagcctctctccgcttagtgcaaggacaggggaactgagcatggtgactctcagagacttaagctgccatgtagtggcactttcattctcgaggcataagtcattttttttggccttgactggttggaccaacactgccagttgcacctgtgtgcccactttccttccttcccaatggagatggcaaactgcttccatatggaggtcattggcaccatgcttgcttcccctgcctgctgctctccacctctgatgaaaccaggccagggactaaccagcctcagttgtttggactctgggtctttgctcctgccttccaatctggggctctttggccatgagattggaagagccacgtcactgtggggtttagccaaacctactgggacttcctgtaagtgatgtttggtcctcaggcccagggtggcttttggagtaacttttccttgtaaattgccagttgcctttgggctctcaaaaatcagcatgaagaagataaacaaaaagcaggaacaggcaattcccagaattagaaagtaaaatggctaataaacatatggaaatttgttcagcttaagtagggatcaaagaaacattaattaaatcagttacaagattctgttctcccccattaaattggcaaaaataatacatgatggtttagatatagagaaaagggggctctcattcccctgctatagggaattaaattggtacaactttaccagagggcttgtttgacagtatttttcaaaaaccttaaaaaagatattctctttgactgagcaattccatgttttggcatgttacttaccttaaggaaataatcagagatggccacaaaagttcacatacaaggttgtgtattgaagtgctatttgtaatgatggaaaattggaaatgattgaaatgtccaacaatacaaaatctgttatgtaaatcatggttcattcaaataatgaaacaccatgaaaccattaaaatatgttgtagaacaatatgtaaagacatgaaaaatatttacggtatttgttacatagaaaaagtcagattgtatttaatataatcctaattttatattgacaacaaaaaatccatattggtgcatagaaaaaaaagagttggaaagatatatgccagccatttaattggggttatttctaggtttggagatgatgggtgatttttatttttattttcttcgtgcttttctttcgccatcttcaagttagggatttaatgcaaacttctttgaattttaaattgtttcccattttttattcataatgtattgatgactgtcctttacttaaattattgcatagacttttgtcagttcatgtaagtggaattttggagtcaaatggcatgtccactaaatccatgttgcttttgtaattaaaaacaaaattaaatccctttagggttttgttctagaattctcttgccactaatcaacccctatcagctggctgtatgctcaagtctgctctccctttaagctatgagctgagagcacgtgcctgccagtgccctggagacagaatttgtcagggaggtaggctctgccaccatttttcccaattcctctctgtacttgtctgcctcctaaacttctggaagcaggggcatcctggtatatccgtccgctttcttggcacctgtgactgatggcaggtgcgctggggaagggagaaaagctctaatgtgtgtgaggacctgctctgtgctagctgctggcctagctcttgtcaaaacgctgatcgtctttgatgactctcttacttcacatctaatcccagtctctttgttctgacttcaaactgtgtcacgagtctaaccatttcccagcacctccacaagtaccacctagttcctgccaccatcccttcttgctccacagctgtgaaggctgcccgcaaacgccacccctccgccaacaccacatccaccgactgggctccccatgttcacctgttcacctgtgctccctgcactcccatctctacccagcagccagaggggtcctttgagaacacactgtgaggctccctccagtccttcagacccactggggtgccccatcgcatgcagcggaaagccaaaggccccacacctcctgacctaagcccctgccactttcccccgtgctcgtccactctggccacatcagcctttttgctgttgcccagatatagaagaacatcttcccttaggacctttgccctgtgtctccctctgcctggagtgtcgcttccccaggactccttatggttcatcccctgctgagcttaggtcccagttctgaggtcacaaggtggcagaggccttcacttacctcacttttcttttgttgttgttgttgtttttaactttgagatggagtctcactctgttgcccaggctggagtgcaatggtgcgatcttggctcactgcaacctccacctcccgggttcaagtgattctcctgcgtcagcctcctgagtagctgagattacaggcgtgcaccaccatgtccagctaatttttgtatttttagtagagacagggtttcgccatgttggccaggctggtctttgaactcctgacttcaagtgatcctaggcctcccgaagtgccgggattacaggcgtgagccaccgcaccaggcctgaccccacttttctttaaccccactttactattatcgaagcacctgttgggacgtgccatgtgaggtatgtgcttcttcgccaataaggacaaagctccctgagagcagggactttctgtattgctgtacctctacccccagaacatacaatagggtgtacattgcaacagaccctgagcccatgctaagaggacagagctgaggaggtgccgagatgtcaagagacccatctgttcaaggacatgatgtatacaccttatagattcaagcttctgtccaactctgaatgtgtttgtcctctattcttagaggcatggcccctgggcagggggttgctgtctttgctgccattctcaaaccaatgggagctgctggctggatccctgtagcccaggaggcctgtggggcctgttaggacatgatccgagatttcctgtgagattctgtctttgcagcccacactgctctgtcctcagttggctgtgttgtgtggttattggtgccagtgtttctaagttgtgtgtctgggaaggagacccacctgttattttacaaacagggtaaagttccttgcctagaggctcaggcaggaaacggggccacatcccaactccgtgacagctccaagtacaggagggaggtttttagagtgtttcactcagtcttcccacttgctgcctcatccttgtcattatttatgatttgttgagtacccctactgtgttcagcaggctaggagatataacgtcgtcgttgttcccctgcctgaggccttggagtctaatgtagccagacaaatgactcaggcataaaccaccttcccaggaaggtgcttacttctccaaagtgccgggtttctcaaggttttgatttgcacgtggctttccatttttaaactcccatggggaggcgtggagacaactctggggtgagggcgagggtgggggaggcagggctgggaaggcagactggaaaatgttggctacgtaagggtttttgagaagaaatggcattccaggcagcatttctgagccatgcagttcgtgactcaagataaaacattggtctggggtcaagatgttgctgagaacagagaaagtgaaggcaaaaacccagtgaagggagcaggaatgggaggaaggggccagaagccaggggaaagtttagcaactgaaggtagagcagaaatatttatatccatccaactgtccattccttcatttatctgcttggagaaatgcagtttcatcctcaaaaatgttttatttatttatttatttgatggagtctagctctgtcaccctggctggagtgcagtggcatgatctcggctcgttgcaacctccgcctcctaggttcaagcgattctcatgcctcagcctcccgagtactgggactacaggcacatggcactgcacccggctaattttttgtatttttggtagaggtgggggtttcaccatgttcaccaggctggtctcaaactcctgacctcaggtgatccacccacctcggattcccaaagtgttgagattgcaggcatgagccactgcacccagcctcaaaagtgttttaaaacctgtggttccctgcttgctggataatgttaggccccctttgtgctttctctcatagtacactgtacttttccttcattgcattcgtcacagctttaagtgcttttttttttttttttttacatatgtatacttacttgataagtcatcagctccctcctaatgctctgtgaagacaagttccctgtctattttcttcttgtatcccctgtctgagagcagtttttggcatgtggtaggtgtttacattgaaatattatttgaataaatgaaaccatcaatgaaggcagtgaaagaagcctcatctggtgcactaggggattagaggatgatgtagtgaggggtcaggagaggacttgaaagaggaaatcccacttaatctgctctgatatggtttggctgtctccccacccaaatctcatcttgaattgtggctcctataattcccatatgttgtgggagggactcagtgggaggtaactgaatcatgggagtgggttttccagtgctggtcttatgatagtgaataagtctcatgagatctgatggttttataaagggcagttcccctgcacacatcctcttacctgccaccatgtaaaacatatcttgcttccaccttagccttctgccataattgtgaggcctccccagcaaagtggaactatgagtccattaaacctctttttctttataaattacgcagtctcaggtatgtctttattagcagcatgagaacagactaatacatgctctgtgatgcttcctaaatctacaacaatagcaccaccaccatcaaaaccagtgtctagcctaagctgaaagctgagtgtgtgccaggctctgagtttagtgcttcacatacatgatctcatagaaagtacgtatgactatccttatttcgcaggtgaggaaactgaagcccaaggaagctgaataatttgtccccaggcacatggtcagcaagtagtagaattgggactctcatgtgacaccccctgcccccaccaagtggtgctcagggtccctctactttgtggcctacaaaacagtatctactgttgttgcaaataaccatcatggaaccgaagcaagagaaattgcagctgggtggagggaattttgaggtacatggatgctcttcgagagagagacttttagaaatacagcaacaacaacaacaacaacaacaaacataaagaaaaaagggagacttctcctttggagacttataagaagggaatgtgaatggttagggtgaagtggctctgctggggtcctctttagggacacagtggggctcaggattctcctgaggttcctttcagggcgttgtctattaggaccgttaagctgctaatggagggtgacagtgcttgacatttgggtaattaaaacatctactgactgaataataactttttattgacagtcatactggtgaaggcaaaattaatttgatttttgacatcctcgctgagttcccggctagacaggggctgacgtcatgcagatagagttgttgaccctgtggatggtggctcaggccctcgggtgggcttggctcaggcccagcatgcaggagccagggtggtcaagttcatggcagggaggcccagctgatccaggcagctgagggatgcacactgcagggtcactgtacagtttacatgtaggttccaacactaattctagaaggagtttggggagatattgtttaaggtggaaatgtgaggtgccttatagtccattaatagttagaacaaccccctggagcttacaggtcagacaggaatcgtggagtggaattgggtgtaaggggaaaagggtgccgggagatgtagaaagtcccttacatcatacatcagctcacttgattccaataactatcataggtgattattttattcccattttacagatgggaaaatggaggttctgagagctctggcactgtgccttaaagatagcacgatttaaggaccggcgttgctttctgactaggtctgtcaattcgaatcccaaggaacctgtatatcaagatgaatttctctagtttgatggtagaaatgggatggtccaggaaaagagagattttctttggcagagccacaggaaaaccacatcatatacggctattgatgtcatcatttactagcaagaggatgctgggtgggagtgacccaagccaaagggtgtttgttgctctttccatgattagggcctgggtgagaatcctgtctccacttctctcggagcttgagtcatccaggggacaggatcagcctgatgtcagagacagggactcaccagtggtctagagctgcactctccaatacgatggctgctagccgtgtgtgggcaatttaaattaactaaaatgaaataaaacttaaaaaccagcttctcagaagaagtagccacatttcaagagctcagtaaccacatgtggccagtggccaccattttgggcagtgccatgcacttcatcattctaatggatggagctggaccagaggccacctggttctttccggcagcaagacaagagaggacactgcttttatttccaagctgtatgactttgagtataatacttagtcctctgagtctctgtctcctcttctgtgaagtgggaagtgggggctacagtgagaactaaacccaatggtgtacattaagcttgctccatggcgcttggcacatggtcggtgttcatcaggggctggtagcacctgcatattccggagagacagagacaagcccccttggtctggtatatttcttctacagatcagtttccatttggtgagttacctgaggccacacatcttcctgcctggttgcttctggaatacataataccagaaacaaagaaacaaacaaagaaataaaaacagaaaacaaaccattggagacacatgcttttttctcagtcttcccccatgaacacccctgtcttgccatcctaccaagcctctctatttcctcttccctgcggggtggggcgggggggtgttgcagcactctggaccctcccccagggcttgcatccttagattttctctcttgccttcttctctctttgtccttcaggcaaagataacaagttcaactatttaactcctggagcttgttaatgagttatagaatctccattattttgtacctgggcagcctaagggtggctgttaatggcccacaggaaagcactctgggttttctttgcttatactgccctcccttcctggaagaaggggcggcaggatgtaaactggcccatggttgtccagcttgagcatgcttatgagccacctgaaaggcttgtgacaacacccgcctctgggccccacccctgactcttggattcagtatatcagtaacaagctgggagcttgactttctcaccagtttccaggtgatgctgctgctgctgacctggggctcacactatgggaatcactgttttaggccatgcttcccagtcagctgaatgctcttgaacaatctacattagcattacacagagggcttgttaacaggcagatcgctgggcccctgccccagagtttctcttccaattgtgggagaaggatggaacccaagaatgtgcatttttaacaagatcccaggtgaggctgatgctgctggtctgagaaccaggctttgagaaccgcaggtgtctttacaccaatgttattaatagctctgggatctgtcaggcatgagagcaaagcctgtctcaccactccgtgaccctcaagctacctgagccccatttttcccatctgtcaaatgggaactatgggcttctaagattgttgtgaggattgaataaactaatggttgatgcttaataaatgcttggtttttctctcctctgaaggtgagctgtcttgactgggctgatgctgggctgccaggaaaaagaacacgcataactccggattggcccatgatggcttcctgctgtggcccagccagcactgcccgctttccctctcttgctcctcagcctggcagtccttattagcctctcccccaaaagccaggttgccaaacctctcagccttcaagtgcccatcatacctctgccctcttggtacaacttccctgaattcttcaaaccaagggtgtctcatcaaattgtgcattaactgtgttacaataagaataaactgtgtttatttctagatggcctggagcttttggctgtcttgcttaaatgtgactcaaagcagttaaaaaataaagaaggaaataaaatgaaaaacaacaacggaaagaagaaaagggcaacctcagcctgatgaaagacttggaagagtgagacctctccctctccggaataaattgctagttgcctttcagtgtcttgcactgtaattgattcaaagaaaaccaaaatcagccctgagctgagctggtctgcgtcactctgctctgggactcccgagagcccctgaggggagtatgaaaaggatgtttggggccaggcgcggtagcttatgcctgtaatcccagcactttgggaggctgaggcagtcggatcatgaggtcaggagttcgagaccagtctgaccaacatagtgaaaccccatctctactgaaaatacaaaaaattagccaggcatggtggcggtgcctgtaatcccagctactcaggaggctgaggcaggagaattccttgaacccgggaggcggaggttacagggagccgagatcacaccactgcactccagtcagggcaacagtgcaagactccatctcaaaaaaaaaaaaaaaaaaagatgtttgattttgcctggggtctgtgagaaccctggaaccctggaaatctttccaggattctccatggactgtgttactctgccagggcaggaactactaagagccaaggcaccaaaagaggactcaaaagctggacagaggcaaggagtatggggcctcagaagagcaaacacaaaaacaaaaattctctgcctgctaattcctacttctggcacagttgtggtcctttatagcataggtagtcaatccattttctctagtattctcccataaggagcatcagcgctttcaagctatgtaacttggagtatgttatttagtctccctcagcgatcctagctataaaatgggaataataacgtcttacctcttaggcccactgctcagattgaaattatgttcataaaatcaagcagtatgctgcctaaccataataggtgcacaataaatatctgttcctttttccttatctcagctgtatcagaagcactgatgtagctgttcagagataaaggtgctgctcttggatgcattagcttgtgccagcccatataacttccctggtattctggccttggccaagtgagactgacacactggaagagaaacccaaacagaagtgacaggttgaaatctcggcagcaggcactgtggctccctccacctgcagcttgtgctcaggaaggaagcaggcaaggtgaagagaggcctcccagccaggctgctccctgcagagtcagtcaggaggaaagtagcacccgcttctgccctcatcgctgggatgcagtgagtcctcgggcctcaggtgcaaggaggtatgtgcaatcctcagttcatcgggcctgggacttaatcggagctgcctcctgcatgactgccatccttcttccctgggcagtttagactcagtgaagatgagttaggacatgaagaatgcagtaggattgaaccctaatcagatcattactacagcaagagaaaaaaatcattccaggcccaggctgatgtctctttctgtatcttttatttatttcctaatagcctttatttatctgtttttctgctagagggctaggaatcttccttctcctcctcctttttatcttgccttccttttctctctccttgggttttggttatggcttttctttttgggtgctggttaaatgtggtcctgaggccccttgttgtcaagaacatcattcactgatttctagttcaagacaagaagaaacattttgctgtggtgctggctcaggcttttactaccaggcttccctgcagacctaggtggatgttgagtggacaggtggttgggcttgagtttcactgggctgggggagtgggtggaggggagtgaggagaggctactggagatcaggaaggaaggaggggagtggatctgggaatgggagtttggactagggctgatttttggccacttgaatttaaggagtcctcctgacatgaccttctctaattgaaggaagcaaagctgatttctgcctctgtatcccttgtcatgtttctctgctcctttcaccacatccagacctgtgatgactctgtatgtgaatggccagaatgcccacagagaccccagcgcccctctctgtgggtagcccgcccctgcttgccttccttctggctcaagttgggggacgatcaaggcaggagcttgaagggaaagaggagggctcttgctgtctctggtagacctggcagaggtaactctaaggaaactgcccaaggctgctagatctcagggcatttggtacttcctagatctccttctagtctttaccttttctcctcttctcattcgtttttagaatagcattgcccatagaggccagttttctgttaaattcatagaggacgtctcatatttctctattgataaccctgaatcacatggtagcactgaaggatgctggcaggaaggaagaagggagcaaaaagaaacagctgtgagatggatttggggcagctgaggttgcaacatgttctgcagtaacaagtgtatcccttcctgtggtgtcctggatctttctgagatcgccctagactctcaacagcgacctgtgagttctgactttccaagtgccagagaggaggcaccttgtatttctgggctgttcggggcctgagatccctggccttttcaccaagccagcttccctctgtgagttcagcaaatgtatttggacgtgtaccatgtaaacagtgaaacactaaaggagagaatgagaagaggcagatggaaagctggagctggcatctggcagtttggaagcaaaatcctacgtgttctgtgccaatttccttcatatcgtggccccatctgcctccagccctgttaacacaggcctgggcatctctggatcctgagtgatagtgttctgcttcttgctccttagcatcttccattggcattcctctccaagaagcatgcttcttcacgggaggttccggtgtagctctgcctacacccaggctccacacttccattgctccccctgacaccgctgcatcatccttggaatcccaggtgttagcatgccacctcagttttctgtgtagttctggtagtcttaattaatacctttaattctttccctactctggaaaaacttgttgaatgtgactcatcaagatggtagcaaaccaggacttgaaataataatcataggtctttggggtgctctaccatgagctcatacagcctcctttctgacaaccttttatatggtgatgccactttggattgagaaggcaagaggaacttgcccagaggtggttatgattgatctctttctgcaaggttgtcctaaagtttcatgcttctactgtaggacttgagagtgggactgaagtttcaagatctgaggctgcaatgttgataacttttggcagtcttcatctccccatgattaagccttccttgccggtgaccttcatgtacactccattacagccccataatagccagttcttggcttgctttgtggcttggaatttctcttcaatccagacgtacctacctctctttcttccttcttcctgctctactttcctttttgtaccctaccttgacctctaatctcttggtctcctctgatacctgggtcctcttggctccatttgcttccccatcgagacaaaccccattgttagccagtaaatggcatctccctggagccccaaaatctgctccctccttgcccttcttgctctgcctgctttgacgacccctaccctactgtcctgagttgctgagcaggatagccacgggcccatgctaagtgggttcagtgcagatctgccatgcaaaccccagcaagaccccttgctgctttttggcaggcctttgattcagcttttgttgacctcacagcagctgcttgccttgtctatcctttctgagccctatatcttggcttttaaagtctcagttaatatcttgcatgctttgttgaacatgaagctgcccagtgctggtagtcaaagtattcctttttctaaaccttaatagtgtttttttgttttgttttgttttgttttgtttttttgagatggagtttccctctctcgcccaggctggagtgcaatggcacaatcttggctcactgcagcctccacctcccgggttcaagcaattctcttcctcagcctcctgagtagctgggattacaggtgagcaccaccacacctggctaatatttatgtttttagtagagatgtggtttcaccatgttgtccaggctggtctcgaactcctggcctcaagtgatcccctctcctcagcctcccaaagtgctggggtaacagacgtgagccactgcacctggccataaaccttaatagtgttctgtatcctcaccttttctttcttgtatcacttaaagaaagagtctaggtagttatgtttagtcattaaacatttgcccagtatccactctattcctgaggtaggaatatacatgtaggtaattctctttcctaagatagtcacagcccgtaagatgtggatcctgtaaaaaactgctgtaaaaggtataacaacataatgaggataataacaacatgtgaagagcagtagtcttcattaatgagcacttgctctccatcaagtcctgtgtcaaggacttttcatgtatattacacttaatcttgacctcaatcttgtgacttagggacttacaggattctcattttatagaaaattgagactgagagctcaaataagaggtagagctgggatttgaacccagaatgtgcatttagattctaccaactttggcctcttttctccccaccttccttcaaatgggtggactcatccagggcaggtctagagagccttcagccccctcccacgtcctctctgacctcttggttttcccaagttcatatgtttctgctgaacaagcactgctgctctgacccaccacaaatttagctgctgagcacgtgtagaatcacatcgtgcttttaactgcaggcaaaacccatccccctgggaactgtcccagtttgagggttaaaaaaaataggcagtcatgttaaaatagagataaatactatagacagagagagacatgaaaatagatccaggagggatggtagatattctatctaaatagataccagagataaatacatggaaaccatagataattattgtagggagttatgctcaataggagactctgtggataaatatatagacttcacagatagtagaataatattgaggaagtgaaaaaaaatggcgtgtgggagtctgtacaactctgaggggctgtgctgaatgggactgagccctcagcaccacgtgttgcatggaactgatccaagggaaggtctgaaatacacaggcagcttgcatacttccagaagccatgctgtacactgggtagaaggagtgagtgggattaattgaggactgtgtcagtagggctggagtgggatgggggatgatgaaggcagacctgggagaatgtggcaaggttgagccttttaagttgatgcaggaatgtggaagggccagtggagcctgggagaaaggaactacttggaaagaggagtaaggatcaggcctttccagccaccctactaactgacctgtgtaggtgaatcattattttggcaggctgcctgtacaagagtggggaatgggggcatatgtcaggaggttgctgcccaatgtaagaaccacagagaagaaagtccatcccaggctggcactgttcctgtctttgacgatcatggctctactgtgattgaacatgggattggccaaggctctgcctgcaggtcctcagggcgggtgatggacagctgggataagcttgggagaggcactcactcatatgtgcttctcccctcccttgtctctgttcttctcttccctgtccatccaggaggctgctgggaggactttgcagttctgttggacaaatgttcctatactgtttggctgtggaatttttcattcaagggcctacgaaatgggcagaagagagctgtgggtgtgattcagaaaggcagggctgtgtgtccatttctctatgggctttcagctctttattgaaacaactgagtaggaaggggatctgcaatcattaagtgtgaccttcacatccagatggtgatcccatctcagtatcttactctcctttcccagatgaaagggagagatatctactgtcatggaggaggaacttgtctttaatggccaactacccatcattctccctacatgtctgacgtgcccattgaatatctagccttgttctggggtgagttagggactatggagaatagaaaaagcaaggtctttatcatcagagaattgacattaaaatagtttatgctaaaaagccaagctacagttatctctccataggggagaaaaaacccagatagttgctgcttttgtatcaggagttttgccttctacacatgatttagttactatggcgttctctaaaatgtcataaggcccagatgtgcttttcagggcttagccctgacagtaggccattttggcaaagtcaacttcctctgtaaatcaaggtctctctttctttgtttgacaaggcttatgatgatgtgattcatgaggcatgaagaggatcagacaaggggtatactggagaaactcaacaggtactaacactaccttattagagagtttcagatcagccagttcaacagagaactttaggtacacatctcctgtggagttaaaattccttacctgtttgtacataagagaggttcccataaataagacggaaacagttccaaagaacttttctaataggaacttggctaatcaagtttctagctggacttgtacccagaggatttatgagaacaaaaatcatggggacagtcatccagatggcatctggtaggggtataggttcttctccagcaatattctggggtatctgcccagtcctggctgtgtggaacacccctccctccactccaggcaggagggagggtgtcccagagaatgggtagccctaagcaaccatctggtcaccaagcagagcctcaaaccacctgatttggggacagggaccatatgggcttttcaaggttctaccttgcttacttttgactttagtcttaaagtgctctgaactggaaacaggactaagaagaacgttttctgctagagagctagaagctatgattatatggatttcttcccctggtgttggatgctcctggtggtgggtaggaccatgatcctgtggacagaggatagggccagaactttcagtgcttggttggcctcctatcagtgaggtgctaaggtgacctctaccctctttctatcatgggtagaggaaatacaatcctggagcttgaattggtgcctgtaaaattcagggaacactactgagccatactggggttagttatcgtcacatagttgtcatagatcttgattcagtacaaaaacttgttatcaagcatatgttatgtacctgcaaatgagccaggctttggagatacgaagaaaagcaagatgagatctctgtgcttagaaagccctcagtctgaaagtattattcttacttacaattccttcctccctctcaactgtcaggaaactatgtgttgaggttcatttagcccattgcatgtgggtaagggtgaaggaggcagggagccctaaagtgaagaacagacactgagtctagaatgggactgggacctcagcagcagagacccccataacctcttttgagctaagtttaggctcttcttgaaagctccttggttctgtcatgtccaccctctcgctctggactgcagtggagggggcactggaagttacaatgtggtagctatgggcatagaaaccagacagacctagaccagagtcctagccatgcatgatggagcaaattcaccaacctccatgagacttagtgtcatgatctgtgaaaagggataattgtagaacctacttgatgaggctgtgggagtgtaaaatgggacagtgcattagagaaaaaaaaagaaccaacagtagagaatgtggaggttgtcgatgtgaagtttgcagctggagtaaggaagggtgtggccttgaaggacgagctataaaatcagttggtccatctctaggtgatggtattagatttttaaggcagccataacaaattactgcaaacagcatggcttaaaacaatggaaatgtattctcttactgttttgaaggctaggagtttaaagtaagatatcagcagagccatgctcctgccaaaggctttttaagagaaatctgtctttgtctctttcagcttccagtggcccagacatttcttagcttatatctgtatcaccccactctctgcctctgtctcacctgaccttcttctctgtgtctctgtgtccttttctgtcttttataaggacatctgttgttggctttagggcctgatctaaccctgtacgatctcatcccaatccttattttaattatatctacaaagactctatttccagataaggtcacattctgaggtttgaggtggacatatgtcttttgggagcagaagacactgtacaagtcactacagtgaccaagacagaagcaaaagtagttctattttcatccaattcatctgtttcttctgagctccaggttatttggcctttcatgacaggagaaaagaagttgtggggagtggttcattcattcttccacctattcaacacgtatccattgaacaccaccacatgcgagatggaaacggtgccaggcattggagccataagataaaatagatatgtgcctgctagaggcctggttcagtgctcagttctagctacagatgtgatggacacactcactgtcccaggatagctcagtctccaggagaaggcaggcgggtcatgaggtgaggaccagctacagtgctaagagttctgacagccaccagccagggctctgcgatcacagcagagagacacccagtggggaacacgggttgtccacaaaggcctcctgagaaaagtggcttctgggctgagtgttcagggacatacagaatccattagtgagagaagctgtcttcagacagattggaaatttgtaaaaatgggagacttgagagaacaggacagtttagagagccaccaacagctctgtctggccttgatgcttgcatgagttggtgactggaaagcaagaaatgatgtcgggcagggcttatcttcatccttgtcatcgtcattgttgacatcactggcaggtatggagcactcactatgtgctcctatgaagcaccaagcactcttaacacttcacctgaattaatcttcacagcaaacaaataagggagttgcaccccaggtttatagatgagctgagttcagtaatctgtccaagggatggagcccagtgttgaaccacagcataaggaacttggctgttacccccatccccaaagcactgaaagtgtgtgtgtgggtgagggggatggggaagcccccctactcaccacacatctttacatgaaggaaacaagataatcagaagttcaaatgcctaggattctagaatggggggcctttggcctttggcacaggggaagctgatagagtgggcatatgaagagagaaacccagggctgaccctcagtagcccaaggaaagcaatgttctcacccttctaacaaaaatagtaatggaagcaatgacagaaatgataataaagatagaattcatttggctgtgagtagcagagaagctccaaataacaatggctttttgaaaatggacatttacttctgttttgtgaaaaagaggtttggaaataggcagtccaaggtttttattttggtttggtgatcatcggggtccttttatctaggggctctgccatctttaccttgtagcttcattggctaaattggcagctagggctccagccattgcatcagcatttcatgtgcaggagggaaggagggcagagataggcctacttcatcctatttagggagacttcctaggaattactagccaagacttctgtttatatcccattggctgcaaggggaggtgggaaatgtagtctttatgttgggaagacatgtgctcagctaataacaatgggaaaggggtaggaggcacctgctagtcaatgccagaaactgttatcatttatggagtacttcttgcgcaaaacactttcatccttgtaacacacctctgtgggatatactacagttgtccctcagtattcatgagggaatggttccagaacccacctccccgttctgcggatgatggatgctcaagtccctgatgtaaaatggtacagtatttgcatataacctacacacatcctcccggagactttaaatcatctctagattatgtataaaacttaatacaatgtaagcgctacgtaaatagttgttatcttgtatttttaaaaaatttgtatgattttttattttgttaatttttatttttttccaaatatttttgatctgcggttggctgaatctgcagatgtggaacccacagataccgaaggtcgattgtcctattattacccccgtttgatggataaggggcctgaggctcagaaaggaaactgaggccacagcatgaggaagaggcagagctgagtcccaagcccagctctgagtgcctccacagactggcattttctccatgaagctctcctgcctcacaggggactctaagaaagggttccagaacggagcctccgggccctggaaccagcccagcctctctgacgtctgctctggcctgagttcgccaccctgccaggcaccagatgaagaagcaggaagtgggaaggactggcttagtgagccctcgccctgcgggggcgtgagtgtccgtgggcccatcctctccagccaggcatgccacatgggttccggctgccactctgctcctgctcctgctctgtgccgcttctctgtattatcagcctattctaacctgttgtgggcctgcattcaagatgctcttagcagccacgggctgacccaccccacaccttgtggagggcagcacaagcattccgtgtcccttctgaccactgggggtcaagtagacaattcatttagtggcgggagtgaggccgtggcagggctccctcctcggagctccatttgatggataagcattcaaacttgaccgtactcttttcctgttgcaagtccagatttcatggtcaggtgaaagttaaatttattcatttattttacctttattaaaagcatctctaatgaattattgttttttttcttttagttggttgggggtaagctgactttcttggcaaacaagttattacctgatgccagatttgaaagccgctcaacaagggggtctctttttgaagtattaaatatttcaacataaaaatcaatgaagtacctgaaaaaatggaagtagatgaacaaattaaaaacaacttttttttcttagtgaagactattttaatagttgaaaaaaaaagggaaagaggaaagaggagagaaacatcagacaacccttgtctgatatcaaggtgcaaaaataacccactttgaaatttggggatatattgatagtaaatttaagatgataccaatggctaaaagtaaatattttttgagcaaaaataacttcttacacttggattatgcctccttcttttctttcctgggtgatgaaaatagcctgtgactggggcttcttgcttccacttctaccccaacccatggtctgttctgcacacagcagcctgagccatgtgatgtaagggacaattagctcctgctgttcccccgtgctcagttccaagggcttcccatcaaagtgcctgctcttctggatggtccccatggtcatgcacggcctggcttggggctgcctctctaccctgtctcccccttatcttgccactggtcacttcccctcagtcacgctagccccctcactgttccttgaccatgcagcctcctgtttccctggggactttgcacgtgtgcttcccaccatggagaacaggcttccctgagatggtctcagggccccctacttttttttttttttttttttgagatggagtctcattctgtcacccaggctggagtgcaatagtgcaatcttggatcactgcgacctccacctcctgggtttaagcgagtttcctgcctcagcctcccaagtagctgggattacaggcaactgccaccatgcctggctaatttttgtattttttttagtagagatggagtttcaccatgttggccaggctggtctcaaactcctgacctcaagtaatcttcctgccttggccacccaaattacaggcgtgagccacctcacccagccacagggtgccctccttcacggcaaccaggcctctgctaagatgtcacctccgtgaggaggcttccatgaccttccagactcggtggctttaacaacagaaatctattctggagttcaagctcaaggtagtggtagggttggtttcttcgaatgcctctcttctgggctcttctcattgtatcttcacatggccttccctttgtgtctgtctagtcctaaactcctgttcttctaagaaggacaccagtgacattgggttagggcttgccctaatgacctcattttaacctagttatccccttaaagaccttttctccaaatccagttacattttgaggccctgggtgttataacattaacatataaattttagggggggtcacaatttagcttgtaacacctagtgtcctctttatcccccgaccatagctctgggtagaagcaggtctcactgcacacacgatgggtgttatggaaaatggtgcaaacttcccggcagcatgttccttgtcctgtgttgattgaggtgcctgggggtgcttgccagagagtttggagctgtgcacagagtggaatatgagtggagcatgtgcagagtgaagcatgcatggagaatatttatatgggcctggaataatgtgcattttgtttcaggtgtgtgcctataactaggggtttataggtgatagaggagcaacaatgaaatgaacatgtaggatgtgtgtactgcttaccaagtgaactcctggcttggggtacaaaatcattgtatgttctggactcttgtctcccagcagagccatcgctgatctatctgaattacagattagctggcaccgaagggactgcagaatccatttaaatggatagctctctaatttattaaagggcttatttatgctgttgatatcgggtgctcatcaaattcttggagtggcacaagcccctttcctgccctctgcttgccattgctgctggaagattttctcttttccaggagagctctaaatggctgtagccagagggctgtgtgtgtgtgtgtgtgtgtgtgtgtgtgtttgtgtgtgagtgaaataaaggggccatgcaccttctgtgggctttccatgtttcttgcagctttgcaattagcttgctgctgatggtgaacatctaaatctctggaagaagctagagtaccacatttttctctgctggctcagaggagaatgaaggtggacacttggctgacaactaggtcctccctttactgcctccatcatcatgataattatcatcatcatcatcccatgtgcaatgacattgagatttctggaatctgacatgtagctcttaaattgctttcctgaacatgaccctgcttcagactcttccagccatgtggcttgtgggcaggttaggggaggatgcaacagatggggatggatatatctgtgcattcaagagtccttctgctgggttagccggatagttctgttctcaggaacgggcattggggcatggtggagggtagtggtgctaggtgtgctttgggccagaattttgggaaaagaagttaaaaaatgccaatactaggggtctttctggaaaggagagagacccacagacagaacttcccctgtttgacctaggacttgcactaacctttgacctttggaggaaagatgttcagtcccacttatgataacaacctaataaataccaaacacttttcacatattcatttaaccctcaaaacaatcctatgaggttggctatcatatcattaccatttgattggtgaaaaaactgagagacgttaagtaacctccccaaggcctctcatctagtcaatggagaaagtgggatttgaactcaagaactgtctgacgtcgtagtcctggtgcttacctgccactctggactctttcccctttggccaaagcgatccaagttcctacacacttgctcctgaccctgtcaaagtccaaggccccaagctgtgcttcctgccatctgctcttgccttccccttgccaggcagaatgattggcttgcagagccagtgagatctcacccagagagagcgagctttgtcaccccgtggcttctggggtctgagcatctgctcggctctccgtccctggcccgcccttttcctttgcaagtgattcactgtgtcagtggtgtgtcagccccatactggcagcaggcatctcccagcgtatcatcagagacagaggaagagaaagacagaagagagcaatgagggcaatccgcctccctcagaaagatattgggagtcattttgaatgggcttgacaaaggactaggaacagctcaaaaggtgttctgcaagaggctatgggtgcagccctgggtggctggaagtgggagtcagggttttcccggcagctcacagcccccaggggcagagcagggcactggaaggcactgatcatatttccctgatgctcccctgaggttgtagtcaatagcaatgtagaaggacctttgctctccttgaaggtcaccaggagcttcccgttgctccaccttctggaattggccaagacactcaaagaacagcccttgctcaggacacatttctttcttttttttttttctttttagagggagtctcgctctgtctcccaggctggagtgcagtggcacaatctcagctcactgcaacctccacctcccagattccagcgtttctcccacctcagcctcctgagtagctgggattacaggcacctgccaccacgcccggctaattttttgtatttttagtggaaacggggtttcgccatgttggccaggctggtctcaaactcctgacctcaagtgatccgcacacctcggcctcccaaagcaccaggattacaggtgtgagccactgcacccagccctcaggacacatttctttttttctttttttctttttttttttttttgagacggagtttcgctctgtcgcccaggctggagtgcagtggcgcgatctcgactcactgcaagctccgcctcccgggttcacgccattctcctgcctcagcctcccgtgtagctgggactacaggcgcgcgccaccatgcccggctaatttttgtatttttagtagagacggggtttcaccgtgttagcgaggatggtctcgatctcctgacctcgtgatccgcccgtctcggcctcccaaagtgctgggattacaggcgtgagccaccgcgcccggccgacacatttctttgtgttcttgataccatatgaatgagattattgcttaagtgaggctgatcatcagaagggactttgtcacaaccctaagccaaccaggaagaacatgttgtcgactctctgtggagtcaccccaatggggagatactgagaaagtgccaaagggttttccggacaggctatcttgcctcagagattctcagaccatgcggaaccatgctaaggctttgtggaaggagggaacgagtgagcagcacatttctgtgaaaatgcagtctttttgtcatatttgaaattcatgtgagattattttaattcttgaaacaggtttcttctcagctctaaattatgatctcagcatcaaattgaagcagtgtctttgttcccaagtgaaacgaaggccccgaggcagataataaactacataagtactgttaaccataggtagaatatttactgtacttaattttctacatttggaccatgaacaaaaaaatagagaaattttatcatctcccttcatctccaacctatgccctgaaaattttcttattattaatatttaaagcccatcactctgcatgaatcattggctataaaaagacataaattttgctctatttccattttatacacatatttctttaactcttccatatgatcaaggttctacattaaaaaatatatatatatatatatatatatatatagaaaacagtctgtgcttgtaatgcttcacccacgttgtcctaactgatttgttcagttgagagctccaggaggcttaaccagcagaacccaggggcctgccatgctcctttgtttctttctactgcctgctttctctccagtttgcccacaagtcatgccttaacctacatgcagtactatcctgctgccggggcacttttctttgccagtggcttcggttggctcatcttagtgacaatgggaacgataagatagaagtccctttcagtctgattctcctttatcaaggcaacaacctgaactctaagtctgttccagctgctaggggaggaaaacgttgactttggattttaaaaaccttgaggctgccccgtttaaatgcctcctttcccagtctaggtattttgcagcatggaaccagagagggctggtgcctcagtattgggtgaatacactggaaatcctgggttctcatgttgtttggttgattgagtgaacttgggcaattcactgggtcttagtttcatcaccgattgaaagggcggcttgtcacctaccttatctatgtcagagagtgattgggagagggaagcaatgagccagtgaatgtgaaagtgcttggttccatgaagcgctatgcaaatctaaggagatgctgtgatgatgaagattataatgatgatgatgttttcaagggtcattgaatgaatatatttcatatttccaggaaatatgttatttgattgttcatatgaaattgcattattagaatctgagtttgagtccagtccaaaaattgggaagtgctttttctcctagaactgccaatgattcaccagtggcactgtttggatgtggtcattaagatgccacatgtccccatctgtctactcctcccagtttaattttttaagtggcacagatcttctttaatctctttccaatagagaggtggggagggtgaagagagactgttggcaaagagcttcgagttcctctgcagaaggctgaggccatgggggtctaccacagggcctgggattggcattcattaccagaatctaagctcactggatgcaccacaccctcacacaaaacacctcccccttccctctgccagttcatggctttgtaaagcacagggaagtgtttgggctctgaggttagctacataggagttgaaatcccagctctgttaatttctacctgcttggtgtgggcaaagatctacatctctctcagcctcagttttctcatctgcaaaatggtgatattaagagtacctttctcatggaagtgcaaaaatcacttgcactttggaaaaaaaaatacatgcaaagagcacaatgcctgaaacatagtaagcacttgttgaatgtttgctgctattattattattgttatcatcatcatcatcatcatcaatattttcagaagctaggagcatttctatataacccactgacccagggggaaattgagatccaggagtattttggcctcatctctggggttgccctcataatgttagctaccaagtgctttgcagaaactccagaactgaaataggaggtgccatgctgtcatattttgctatttctgttctttaattaattctaactgtctaattgtatgggatgcctgttgagttgctcattttgcaagacatgaactctaggatgtctctactataaaggagcctgcatctcatctggtagggcacccaagagcttataaccagctgcaggtcaatgtggattgctcatgtgtggggctgaatgccaggaatgaggagttctggctgggaccggggtgggcagaagcagaggacacttagatcagaatttgtagaggaagtggctgtgaactgggtcagtagatatatagaacactatgtctaccttatattaactttccaacaaatggtagttactaatgttattatttaatggtttgctcgcaataggcattcaatatattttttggattgactgattgcctaaaactggcagtacaaacaaatgaggcaggttttattattcccatttctttttgcccagaacggcctctggtttatattgaactgggctcaatgctcatggtgatggaaccagtcataacaccacttgttgaattatcggctttattttccccttagatttgcagcccagcacattctatctaccttggcacagaagagagcaaacctttctatcagcttcctgtagtgtcatattaatcagtaccttttttcagagcctggtctcagggaagagaacttgaggcaaattgccaaaggacatgaaattctgatttttaccagttccattaagtatagcctttcattttgataaggtatttgtacccatgtctgaacttaacaactctattaattactaatatttatctagccctggctatgtgccaggcactgtgctaagtattttacacatatttcttcatttaaatctcataacaaccttagaatctttgtcaagtaggtgctattattttccctattattgatatgggaatactgaggcagagcgagggcaaataacttgcccagctgaggtcccaaagaacttgggaggtctcccaccatagcccatacccctgaccaacgtacctatggcctcactgtatgttgggcatcagatccatggtcagattgctcttgtcaaattcagagtgaagtacaggcatgttgggttgctggtttcaaggactgttcttgacaaataccctttgcatggtccggctgtcagtcccaggaaccctcttaagtccactgtagccaaacccttctatttagtaggtatgaggtctccggccttggctattaagtggagcctccacacactgactgtgggacaggccctttgaatctctgaactcctataacccttgtgacctatataaaattagcctcattactctctgcccccttaccctgctgcaccttcctttgtggctgccagtaccactagacaaatgacatatatttattggtttagttatccacattctgttgccctccccttagaatgttattgccatcaaacaagggctttgttttgtatccccagttcctagaacagtgtctggcacatagtaggttcctaataaatgttttgagaatctgataaatggacactgttgaggggaggctcattttcccagttttccagataggaaaccaaggctcaaagaagttaagccacttatttaaagttacacagctaataaggcttccatactgatcagctgatagataaccccttgggcccaaattctcttaatattttcagctccttgttcctaaaatacctggaatgtgacaacctgttcgatgggtgagtgcttccgttgctgcacctccttggcctgtcatatgtgctagcaaacttctgcacctatactcccctccctgacaccctccacctccattacccaaagatttttcactttccatctcatttctcattgatttattagcataagccatttttagctcactattataataaatctattaactcccagtgattacaatcagcattaattacatctaactttaaagtatcatacaatgcatggctgtagggaagactccactcttggatgtggcagcccctgacacctctgacagcagatgtctggatacctctttgaaagacgcccatgggctttagcatgttggagttagagtcatagcgtgcttactccaaactagagaattggcttttcggtctgactgaccagggttccaactaatttttcccctttctagccatgtgtgctcaggcaagtcacctcatctcttggagccatagcttcctattttcaccatgttactgggaaattaagaaatggcagccatgctgatgtctcacccagcctctctccaggacgtgatagggggtgatggatccctgtgttgagtgcaggctacctcctgtcctattcttggagctattttagatgtacacctggaaatatttatgacatcacttattctataatacatttcccctttatgtatggaaattagggaactatgttcatccagcatagttaacagggttgtcctttaacatttattgggtccttactaaatgcctggataggtgaagaatcaggctaaagtccatggtaaccaagaagagttagccagtctttcaattatggtgctcttctctacatctaataaagctcattccttatttgcattattaagtcctcttgctttgatgagaagtgggaagcattggctaactgtgatcccctagcatggaatggaagactttagggcatatagatgctgtcattagtggctatattaaaagaagaacctgtcacttaaatcagtaattatcatgggggttaaaagtattaacagcaaagttcttgagttagctaaccactgttttttttcttttttactttactagaattatttttagttaacatttactgagaacttataccatgccaagggctttacgtaagtattttatttaaccccaacaatagtctgatgagggagttactgttattaaccctatttatagataaggaaacaaatacttagtttaagaggcatgaccaagatggcattagttaacagagcagcagaaatgatgcttttgactgagacatgctcctcattgtgataaacactgttgccttttcttagtcaagaggaataaaagcatggagtcacaacaacttccttccctgttaagccttattcttgggttgcagagaatcactagcgagagacagagaggcaataggcaaaccttgatcttcagaagagctgcacgaatctacaggaagaaataactgtgagtgggtggagtggggagaaagaggagggagagttaggttcaagaaatgcttcaagggagtggtggggattgagctggttcctgggaggtgtagggttgggcaggtgggttgtcggcatcaaagcaaatgtcttgggctggagcacaggtgtggcagaggtggaaatgtagattgtgtatttggggaacagcagacgtgtacttttactcaattgctggtaggagatgtggttagtgaaataattagatgaccacggtctttgaatgtcaaacccaatttgtacatgtttatgaatgaagacacacctaaatggtattagagagtaaatttgatgaaaattctgcaacagacccatggaaaatattatatatgctctcttatcatattgtttcctaagttttcttaaaattatagtttgtggcagggagtatattgtaggatgagtacaggccttgggatggattacatggtcttggattggaattccaatttcaccatttattagctgagggacagttggcaggttaataaaatagttctgagcctcaatttctttgtctgtaaaatggaagtgatcattgcaagtttgcaaagattaaatgagctaattatttataaattgcttgggggcaattttggctatggtatatactcatcaaatagtagttctattaaattagaaagcacaggaaagcatagcctgatccctgagtggattttccacaaatactatctgatttatttgtgtgtgtgagtgtgtgtatactactcagctatgctttctatacaaacacacacacacatacacacacacacacacacacacacacacacggtatatattgattactcaatctacctagctaaactttaaaaagatacatgtctaatatctgaagtagaaaacattccatatataaatatgctgtgagcccaggccaagatgggaatggtacctaggcccattagaagtcatccatttttaaaatagatgtcatttattagcttaaggattgtaatgtggtgattttgagaagcatcttgttggaatcccacctgtaaaagtctagttttcccctatagcctgggacacacgtgcctttgaattcatgccaacaatagggaaggacagtgaagaaaaccctgatattatattgacactttctttacttctctttggaagttctcctgtttatattcttggtgcttaactgcattaaaaaaaattcaggggcaaattgttggtttaatgaatgcctgtgccttcaacaaagatactattatgtgaaaatagtcaatagcccattcagagtttcccaacagatatgtttctaaaattgttgagtgtgaagttttgcatctatgagcgtcaggagcacaatgccaagtgtgtgcctagcaaaacttcttcactgtctaatgctttcctatagctttctctggcagatgcagagatgcataatcattgattctgaaccatcttcgattagcagaaacttctaacacttcaagtttctctgctcccaacctctctttcaattggttaatgatcttaaaataccctcagctgcaccacagtgtctttaaagggcctgctatttaaaggcaccttgggaggaatcccctgattcacacatttgcatattaggccaatgttctgagtgtgtttgggaactcagcagtttcagataatattgacaacagcctcttggccagggttgacattattcagataaggcttgctacatactgaccttttacatatatcattttgcttagcttaaatgcttaggtcagtgtcaggatcagctaattaatattagctgttagtgaaccccataaacacacacaccattctgaagtggacactttaaaattacatgaattttaaattccattataaaacactgtggggtttttaatagatcaccaacaaacaatattgttaagcaattaaaaaataataaagcaaacctgcttaaatagctgtaacctcacagggtcaaaattatgcctgctgccctgggaacataaactcttgaaaactaggggaaataaactgttaaggacttaaaatagactaggcatactatgtaagtattcgaagcatcacttccatgcctcttgcatgcggtccatttgagcaggagacaagacttgcttttctgtctcttcagcaccaccttgcactgcattctcagctccagggttgcttctgtgcatcttctatcaggcacagaggaaaagcaatttctacacacctcaccagatcttaaaatatatccttctctgattcctcatttgcccttgacactgctggcatttcatttcgtcagtgttgtagggtagtgggaggttacggttgaccttacaggaggaacttgaagcctcacagagataaggtgacaccttcccgattgcacacagttgtatttacagcagtgctggggtaagagcttggattagaactcaggacccttgtggcatccatctgttgctcttgccttccaggataaatctcctttcctggtaagatggtttgacttttacaagatcttgattttcattttaataatcccaagtcttcccctgactctgcaaaggagttaaatttaaatacatagcctacattttatcttgacattttctttagaatgcaggaaaaggaggggccagatattcagtcttcccatcatgagagcaaaatcctactattgtgttggaaccctttgttaagagaggtgtggggccaaaggcttctttgcaagcctccaggctctccagttacccctgcagacaccaggaaaaacctgcatcccacattctacatctctgtggggaatgtacctgtgtcagcattaagtgatggggctcaaagatagtcttgtcagtctaattgctcttgagtcattgcctctcctgtcagagctgtctgtctccttacccataatcctcatcactttgatagcccgtcaggaatatgggactttgcccagccttgccttcatccaataacgttatgaaattgatactgacacttccattggcactaatttctctaagagattggagccagaggacaagtggtttagcttcatggcagttaagctttccaagtagatcaagatggcctaagattgattgacctataccctgaggaaggaggcagggagaagtgaacagagggagaagagggagtggaaaatcaatggctgcgtcgttgtcatcaaatgatatttattgactgcctaagaaggacaatgtcctatatggatattctgaggatacttgctaggcccctctatagactgcctcaaagggagtttaggagataggatggagacatgttggctagggtggttcactgctttacttgtgatattgcatcactagtgtctggagttcaaaacagcagttgattctacccatgactatcttttctccaccttccactcccacacacaggaggcctaagttactttttatcaggcttactacaccatttttcatccagaccaaagggggctctattaatgatgatgctggaacaacagataaacagactgtccagggcagatcaggatgtgtggtcgccctccttttaatagaaccagacatctctgaactgaatgaggagatactccctttttggcaggcttcaatttcttacctgaaccattgttaggttaatggatgcatgaagaaacagacttttgatgaggaggtaccgtgaaggtgaggagttttaatgaattggctagtttaataatataacctgatctagacatcagtacaagaataatactataaactgattgtgagaagtcacaaaatttcaaaataatatgcatttatacattttcagatgagatctctggactttttttttcccttggtaccagggctaactcactactatagaatctccccaccatctacctcaccgcacctttttggggtattctgtttgggtgttcaatattcctgggtatattacacataagtatattatatacatcactcatggaaatattttatctggtgagatggaagaaggtgtaaaattgtgaagaaatgcagaccagtaattctccttacacacctgttcaatgagcagccacgtgctactagttcatgtgtgttcatacacattcttgttcagggagtgcacatgggatttccggtatgtttatgagggtctgctggtgggcatgcgtggaacctcattgcttttccctgtgtgactgaaggggcttagagtacatggccctgtgggtgtcagctgtcagcctcgcccatggagcctctgcagggcggtcagggcaggcacgtagacaggagcaggtactacagtatataaagcgtgccgtacaagggaagagatcacagaactgatgcggtgttatttcaattgattttggtgttgcatttatacctgcacatgctgaaaatcaatcgaccctctgtaccctcgccattcctgctgcagcgctgttcgaatgaaatgcttatatcatttttatggcatgtctgtgaaagggatgagtgagccaagagattaatagaggctgctggggcccttgcccggctgctgtccaggtgtgtggggagaagagacagcagccaaggttcaaggtgccatgaaggtgaccccccctgagaaaacggagaggatctgtggaacaggaggctagacaagtcctctggggtgggacaaggatgaagtatgtgggcagatggagctacaggctaatgtgtttgctgggtgaggtgtccttccttgcactgccttcctctctgtcctcccctggttgactgtctcaggtgctgcctcatgtcctgagcgcacctgtaacatggtgctcttcctatgtgtcatctctgttggtttatttgtgtgtcccacctgtagacctggggacctgttcaggctgaggttgtgtcttttttctccccttttctagtccctagctcagagcccagcacaggagaaggtatttggtgagcacatgggcaggaaaggccagtctggaaggtgtggcatgaatcatgaactatagtctgtaggtcactttcaaggattctagagggtacatattgctacagttcctggggagctgctcttgggagattaaatgcccatagattgaactcccagttcacccagagcctgagattcctccacatctatcaccatccttataatgctggtttatcccttgtgcctgccactgatgctccagcctgggtgctgaagattaggcatatgggagacatggtgctgtgggttgaattgtgtcctgcaaaaagatatgttgaagtcttaatcactagtacctgttaatgtgaacttattcggaaatagcctctttgcagatggaattaagatttaagttaagatgaagtgatacaggaatagagtgcgcccttgatctaatttgactgagggccttataaaaagaggagaagagacacagaaatggacacacacaaagaggaagatgccatgcgatgagcggagaaggctacatgatgacagaggtcagagtgatgcattaacatgccaaggaatgacaaggattggcagccaccaacagaagcttggtggaggcaaggagggattctatccagagtctcagggaccatggcctggctggtaccttgatttccaactgctagcctccagaactgtagtgcataactctgttgttttaagtcacctagtttgtgttttgttgtggttgttatggcagctctaggaagttcacagctttggagaggcaatgcctaccagtgtctggggtagcacttggggcaacgtatattttgtaattgcctgttctcttaaagggactttaatagggacgcagtgaaattcagagatatccaggatagagtccttgccttgtagggatttatgatctagagaattttaggaccagctgagaagcttgaattgggataagtaaggaaatgggccagtgttgaccccaggacaatcaacagcaggatgggttcaaatgcagacaggttccttactgctttttatgggtgtatgtttctgatgaaaattataacactgggtaatggcacaacttccagaagtaaaatgccataggactgctctgtgacttgtccacaagatatccttgccacagacacagggtggtgggctcctgttataggtcctgagacttggatgtactattctagttggaggcaacactgtgactcaacagagagctgggcctgggagatgtgctacctaagatgggcaggtgccaacacctggtccagtgagcactaggcaagaggctacaggaggccagaagcacctgcaatagtccatcccctatgcaaaggtagggcctgtggtcccgcagggcatgcacagcccccagcagaagtaccttcagggcttgtggaactcagcatggtgctacagcaaatattttctaataaaagggaaagtacctctttgtctgatataagatgatagggtctgtgtcaagcccagggtgagctgagtgtgagcacacaggattcttagggcatgggattgagttcataatctcagaatggcctggaagaagacattggactttcatggtttctagctaactgtaaattcaggcctcatttcagcatctttgatttaggtgcattatagttcagaagtgtgttcattctagacctagtgcttttggccgtatgattatgtaggttgaggtggtggtggggtgggggggcgggtgtggtgggccaggcgtggtggctcactcctgtaatcccagcactttggaaggccaaggcgggcagatcacgaggtcaggagatcaagaccatcctggccaacacagtgaaaccctgtctctactaaaaatacaaaaaaattagccgggtatggtggcaggtgcctttagtcccagctactcgggaagctgaggcaggagaatggagtgaacccgggaggcagagcttgcagtgagccgagatcgtgtcactgcactccagcttgggcaacagagcaagactccatctcaaaaaaaaaaaaaaaaaaaaaaaagaacatagacttgggaatcccacagctccaggacactgctacctactagctgtgtgaccttaggcagactgcttaactgctctgactctaattataggacccacttcactgagccactgtgagcgttggacaggatcacacagagcccagtacagtgccaacaagtgaccagtgttggtcaacaagtgatagcagaccttagctattattatctgttttactacacaggtatttcagatcatcactctgacttttctgggggtgacaatatgccatggtatgactccatgtgtacttagaaatactgggaaaagggttttcttgagacataccctggataccctattgcagtgtatgagacccatacaactgtgggtgacatatctagttaggaagtcttatatcagccagtgcctataagaccccaagttcctccagaaaaggattttcttcttctctgcatcagttctctctctctttctcttctaactcattgtgcctcactttaatttgaaagaacttcatattgaagccatccaggatcacctagtggggttttagatattagatttccctcttgtgacctccgtaaagtcagaggcatttgggcttagccctcaggaatttgggttctcattctcttggctttggtgttgaaatcagatcatgcaagtgccaaaagggacatgatgtgagtgggtggaggcatgaggactgtagcagttcaacatggcagcccctggcactgcatgacctcaagtgatgtttcctcccagtcttcaaaagtccccaggaagttgggggaaagttacagataaatctttagggaaaataaatgtctctattttgaggtaacactagcaagccatagtggctagaactgaatttagacatgttgaaatttgaactatgatctcttcatggggcctcgggccaaaaacccagcattttgtattccagtcaccttatacgtgcaatcagaaggtaactactcacttcctgttgatgcctgggatggtctgaaatactgtctgtacaaagagtctttggagaagtctgatggcatctgccttccctccaggatgcttgttttgacattctcagaccccttgctgccggccattcctgtgctatgaatttctggttgcccctgacagctacatccttatgccacagttgtgggtttggagtttactggaaatgtcatgggcttctttcctaaacaaagccagttctcttacaaatgaatttcaagagagtaaaggttgggagtgggaaggagaatgtggctgacttgtcctgttgttagaaaaacaatactggagggtggggcagcaaggtgctgcagtgaaatgagcccagactttgaagtcagatagacgtggatctgtttaccatttattaactgtgtgatcttgggcaaattatgaagccttgagcttgaatttcctcaactacatcactggggataagaggatctacccccagggttgtggtgatgattaagggaggtaagggaagctgagtccaaatacccatcctgccttccccttccttaagtgcgtgttcttgggctggttgatgagcaacatcattttcaatcaccaagtgatacctccaagctatgaatgctgcgaggcatgaacaacgcctttggttcctgtaagaggctgggagggaattcgagccagagaataaagcttatcttttgggaaatgattcagggagaggagcggagaagtgcggagggcaggccttgctgtgctgcctgcaggaccccatgtgccccggagaccacagagggcagagtctgtctggaagccggaggaggcagagaggggagggcccagaggaacaagtctaggaacagaaggccatgactagtccccaggtctgttcttgagcacagcccgtgttcacttggcctctgtcccacatctgccaataaaaattaagaaattgattttcttttgtttgcctctgaggaccagcctctttttatgagacagtaaatggaatccctctctgagcatggctggatttttaattgtgtttgttgtgcttccacttattccgttttatgagttcctgctcccagatttgttgatgcgaagctctcgcccaccagggacatgtcagtgtttgatttctatcagtaggaaaaggttgaggttttaaaaaaatcattttcttaatccaaaggttggcttgtttgcttcattctgacacattaaaaaaagcatgagacccatgcaggcttatttgcttctgctacccaagtcagatctaagtggtcatgatctgactctgtggaacagaagattgaagatttgagctcaactttgggacagagagtggggaggaggcattttaaaaatggattatatcattgaggacgacaagccctttttttttttttttttttttttttatgagggacttctgcggagacttgctgaagatggtgtgatgcacgcgaagtgtctgaatgaagaaattaaagtaccattggtaaatgtggagatgtgatagacagcacccccaccaatcacaactgcttaaaacaatggtgctgcattttgcacgtcaccatggctgcgccaggtgttggcgggagcccttgcgtctaagttggcctcactgagggactggggctgagtggggttctgtttcatgcttccacaaatgccaacccaggaaaaagggaatgtgacaagtcacactggatcttcaagcttccacgtgggagtgatgcatcctcacttctgcttacttttcattccaaagaaagtgatgggggtactgtttaacttcaaggtggtccacaaaactgcagtcctagtgagtgcctagatatactcaataaatagcagtcatgcttaccacagctcccaagagggcttctgagttgggaagtgagattgctgccccccaaccctactttggaaggaagtacaagtgtaaaggaaggagtacaggaatcgattctggagttggaattgtacaatttaagtctatctgttggacttgtcagcccagagctattttatgtgggctggtccaaccctgaaaatatttggcagtccatccctagatgcactgatttagccccaatcacaggggagctggcatatcgccttctgtatataggctcatgtattcacaccaagcactctttgtttgtgaaaaatacttggtgtcagccatactgttgagaaaatgggtagtttggtgtgaagacgcagaactttggagtcaaacaaaatggcttgaaatacaggttccaccacttcctgactaggtgatttttgaaaatgacttaaacttatttgaggataggttttgttgttgattaaatgagaataatggtagttgttgaggatcaaatgagatgagaagaaagtgcccagcaacatatctggcatgtagttggtatttaattaatgtcagttttattttccctccatctttccttttcttgtaaaccacagggatcccagcatccttggggttctgtcactcctttggaatttggagaagaaccacttctacacgttggctgggcaaatgccctagggttgggccagtggctggattttcttggtgccacatttctgagaattgtcaatgatctgtaagtcatagagttgctggaagagaaaggagttttagagccaacagtagggcattagagaaaataattccaaggcagtctttcccctgatctgaaagagggagtgagtattgatgtatcagtgtattccctgggaggccgctcctttttcctccttcattttttgtgacccacctctttccccctctctttctgcattatgaaccctgagaagaactttccctggagtcaccaaaggcttctgcagaatggtggtgtacccacaggtcctcatggtgacttgttgtcccaggctcctctcttgggactggggctcagcccacctgggtggaagttcatgctactgcagtgaagttccctctccactgttgccatcagaaagttttgctttctctgtgtaaaaagtaaaatagagattcctcttcaaagactttcctccccatctaattaggaataaatagtaacttctcttagaagcaaaatttattcaaagacctgtgctaacattcttaaatatctgctagccataataaagaaatcaatgtactttatgttcttagctcccacaatttagcctaaatatttgccctggcatgcttatactggtccaagcaagcattaggtcatagcctgttcatcttccttatttgaaggtgttgttacctttctcagcatttcacaatttacttcctccttccttggttctcctctgcttttcctcttttaaaaagttctaagttgctagccaatcatgacaaatatagaatgtgaggtcccattccagccaatggaaaccggacacagcagtagggtggacgtgtcaggttataaatgaccctgtctcctttgttcaatgtattgtcgtggcaaaactgctggtgggtgtatcttttctgcagaaagtataaaaacggccttgctgaggaaattaaatttatgttcaagtgctatttctttacggcactggggaacaagcatttcaaacatctgggaacctgaatcccaacttggaataaaccatttatggaattggagccattccttgctctacaccctcatttttcccctgtggaagaacagggaggggaggaaaagcctctggacagagaatatggaccattctgtggggaaagacacctgtcagggccatcgagtttctccagttatccaatggttctgttatgatatggttggaagaataaaatccaccgtggatctgaagaaaaaaacaaggcaccaattttagaagagaataatatgatattgagagtctgtgcagacctctgttcccttgagggtctctctccaaagcttgcatttactagaaaggctatgagaatgtttctcttctttttgattattagtgttgcataacaaagtaattgtgtaatttggaatggattagtgacagcagagaggccgataacaggtaataggcgggctgtgtgtttctgtgcgtgtgtgtgtgtgtgtgtgtgtgtgtgtgtgtgtgtgtgtgtgtgttgagggctcaatagacatcaaagcttgactcctcttgacctgccatccacctcagcagcttcaagaaaatagaagaaagctgcccagacagttgagatatttttccccctattacttttccctccttcactatcttaacaaattcttcactgtggttattaaggtgagaacaatctcagtgagaacaaatgcttcctcccctagaggggctacaggtctttgagttttcccctgaggcaagtgatgtgagaactggccagagtttcatggagtaacatgttggtgtctctctcagtggttctcaacctggcacagctccgtcaccacaggggatgtttggaaatgtgtgtgtgtgttttgtggggagactggactttttttttacattttaaaatttttgtcttttagactttatttttagagtgattttaggttcacagcaaaatcaagtaaaaggtacagagatttcccatctaccccatgcccctacccatgcacagcctccctcatgatcagcatcctccgcagagtggtgcatttgttatggctgatgaagctgagactggcttttcatgcccaggtctagggctgctacatgcctagaacagccctgtccaaggaagacttgtcttgacccagtgccagccgtagccctataaggagccctgctggactcagacacaagcaggcaggggccagttgcagaggcttcctcttacatcctttgaagtgatgggcctatgtgctttttattgggttttcttttaaggaatgtagtttatggaagagcaaaggtgagtaagagggccttgggaatggggcaagagtctgatggtgcgatgctcttttccgctgtggatatagcttaataggaacattcagcagtgacatacatcagaagacatgatgaattatctgtaatctatctgggtgagtctaatgaggtgactcactcccatcccaattctcaagggtcaagaggaacatctttaaaaagggtcttggggagctgcaattgaaggcagctgcttatgaggaagataatgtaccagaattgatcaagtatccctttgcataaattctttcccccacagtctgcactttcagggaggcagtgctggtggagggttatgagcacaggctccggagccagactgtgagtttaaattccagcatcaccacttctttgctaggcatctgtccttgggcaggtcactgctctgtgctgtaatgcccccgtctttaaaatggggaaaataatggtaccaatgtcacagaggcattataagattaactcctttacagagcctgatgtgtaggaagtattcaataataaaaattattacaatcatcagcatttctccaactaactcctcaactcactataatttgacttttccttaacattccatggaaacttctctcattaaggtcgcctacacattttccaacacgttggctcattttcaagcttaatcctgtttgtcctcagtgtatttgtctcttgaacttctagacactctccttctttgaatgctttctttctttctttcttttgagagggagtcttgctctgttgccaggctagagtgcagtgggtgccatctcagctcactgcaatctccgactaccaggttcaagtgattctcctgcctcagcctctctagtagctgggatcacaggcatgcaccaacacacccagctaatttttgtatttttagtattgactgggtttcaccttgttggccaggctggtctcgaatgcctgacctcacatgatctgctcacctcggcctcccaaagtgctgggattacaagcataaaccactgcgcctggcctcctcctttgaattctaagacagtatccttttctggtttcctttcacatctctggcagttctctttttccttgctccccttctaatgcccacattttaagtattggggtccccagggctctgatgtctggctttattcttttatctctctcaggtcttcctgggtgatcttattccttcctgtggcttgggagtctgtggcagaacacttccatctatgcaccttaacacagctttttcaaatcctcaaataaggtagagaaggtggagactgttttagatcccaggctcttggaacatttcattgactacttgctatctatggactttatgtgagcagattcaaagaaacagcctttcacaaaaggtttaagtctcgatgtggtatcttctcaaacttctccctcttccgtgtccttcctccatgtcactttaaccatccacatcctataatgctgagaacagaaaggggcggggttggaggtgaacttctgttgcgtgtggtctttgtgtcttcctgcattccgtggtctacaattctaataaagcaagtagtctgtagttgcaggaaggcttgtgagctttggagtaaacaagacagcctgggcatggatcctgtcttcatcattgtattctgtaatctctcgctccagacacctccttcccgcagccctgcggcttgagactgcctctctatgatactaaatccccagcttcctcttttccttgcttgcccccttgttttgctgacatccctcttcctgatgcatgctaagacggggacaagcaaggcaaatttttacacatttgcaaatacttttattttgttcttagagtggattgattttttttttttttaggtgtagatttccaggttaaaaagttccccatccaaatgttgaaggaattgctctgtagaataacaatagtggtattgttatagagaatgattccattgtctttctgattgctgttcctttataaatgtatccctcttgcctggaagctcttagcatcttctctttatctctagggctctggcattttgtaattgtgtgccttgatatacgtgtgtgtgtgtatgtgcgtgtatgtgcacatacattcatagttgtgcacttgtgttaattgtgctggaaactgggtaagtaatttgggtgaaatttccaaaagtttttcagttttccattcatctcttctgttcatattcattttccctgtctctctctctctgggatttcttttaattagatggtggatctctttatcaaacctttgattttcttatctttccttttttatttaccacctctttcctctttgtttaattttctggaagatttcttggctttatcttccactctcctttaactttaaaattttgacgatcgtaatttccaaggactcttcactacccttgaattgttcacgttttaaatattgccttgcttgtatagatgcagtgttttcactgacatctctgaggatattagtagttttttttgtttagaaagtcttcttctgcttcctgcattgcctctgtttcctgcaggtcgctgattgtctacttgtcttgtgctctcccatgccggagctttgctgaagtgcctggtgatcttgactgcttcttcatatttaggaattgagccctagaaagctagtgcgattctgccttgtgtgcgtgggtagggcttgccaactggcaggtttcactgtggcatgatcacagaatgagcttgactttccactggtagatctccaaatgtccataccgagaggtattttttgagagaattcatccagagatgtattctctaatctcctgcagggtgctggtatgagatgagattggtgtgatggggaggcagggttgcaggaagaaggggctgagcttcatgcttcatcccagccctctcctgagccttctgagttcaatgtctctgggtaaaccactagagtcctgtgggaagggagcaaggtgatagtgggggcggggcaccttgttcccgcctggagcctcactccacctcagccttcctggctctcttgtcctttcacatagtgatcctttccagcagaactggctgcctgcaaatattccccctgcagtcctgttggtcatctcttcttcaactctttcctctttcctcctcttgcctctttcttcttttgactttttaaattccaaaatattattgaactatcttattttctcttatcaccacttttcctctttctctttgtgcacagatattttttgaatttccttttttgtattttagtagagggaatggttagtgtatgtttgaggagggaaagaggataaaaaccagtgcttagttttccctgtttaactggaatttgctataaagtttttcaaaaagtttacaaggtgttttcaggaactggcttcttttttgcaaggcaagtgattattgtgagtatttgggcaaccacttacagctacttttccatacggtctccaaacacagtcagatatttgtcatggattggaataagcctgtctgtgctgatggagtggaattcagggtcctccatttgcatttaccagtctcccatttagttctgcctcattggtgcttcacctcgctatttgatgggaaatattctctccataaacttcagtaagatgtaatggatttctgcagtggaaatattgttcaagctgcaaaaccaaatcacagcaggcactttgtctggggcctgtgtgtctagcaaagcagccattcaaaacgccagttgtatgaagccacaaacagtcacagctaattcactttacaggagttttatttgtatgtatgggagaaccacggcaccaaacagaagcattcttctaccaagactgcagcgttaattatctttgccatcttgggctttttgagtaactgtatgtccttactggatttcttctttgggttagaaagaagtgggagtggaactggggttgatgaagacacaaatgatgttctttgaagccattgggtcaatgtgatatttcaagagtggggcagctggcccagctgctggtatggagatcatgatgcagcttcgttactgtcatttgtaaaacttggctcagcttaggtccaggcccacagtggacttacctccctgtgaacaagggagggttgatggctgagtgcagtaaaagatagaggatactcccctgggagtctggtggccagctggagaggctctaggtctttgagccactcatcagagtttcttgatcctgattgtaaatgggactcacctggggagctctcacaatctgatgtccagcttgcacccccagaccaatggaatcagaacctctggggatgaaatccagcatcagacattgttaaagctccctagaagaggaggtacagggtgcacactactgctaggtcatttttaaaatcctattgttgctacataagaaaataaacgtatttaaaactcttattttgaactaatttggacttgggagaaagtgaaaatagtttatgccagggtcatttaaatttaccttgattttccagctgtttccatggtttgataggtgagtaattctcaagaaagagaatttagggtggttctctgaattcagaatacagagcattcgaggaatacgcttccagtggattttgctaataaagaaaatgtgggccgggcatgatgactcacacctgtaatcctagcactttgggaggctgaggtgggtggatcacttgaggtcaggagtttgagaccatcctggccaacatggtaaaatcctgtctccacgaaaaatacaaaaattagccaggcatggtggcaggcacctgtaatcccagctactcgagaggctgaggcatgagaatcgcttgagtccaggaggtagaggttgcagtgagccaagatggcgccactgccctccagcctgggtgatggagagagactctatttcatttaaaagaaaaaaaaaaggcaacctatagaatggaaaaaaaattgtaagccatgtatatctgataaggggttaatatctaaaatacaccagaaacccaaacaactgaatttatatatatatatatatatatatatatatatatatataacacaccccccaaaagtaaaaaaaagaaaatgtttgtgatgggaacagtagttgggggttgtctgtggacagggctggaaactggccggatgtgacgtcaccaggtcctgcgtctctcttggtgtgtgcaggtcccgtggctgtcatcagtggtgaggaggactcagccagcccactgcaccacatcaaccacggcatcaccacgccctcgtcactggatgccgggcccgacactgtggtcattggcatgactcgcatccctgtcattgagaacccccagtacttccgtcagggacacaactgccacaagccggacacgtgtaagtactgggatggaatgctctccctcctggggaggggagggtggttggtgatagaccatgtacctggggttctggaaccttctagggtgacctgctacctgccaacctcccactttctaagagaccctccctgtttgtttcaaaacttgaagaatagcctgagccaggagtccccgggaccagagtcctctgcgaagggggtcctgtgggtctgaatctgcttcccttttttcttcacctgggctcagcaggaccctgggtgctcccaataaggcaggagacacagagaggctgttcttctctctagacctggcctatgtaactaggaaacataacctgactctgtttagacagcagcccctgagctcaccagaacctccacccaagcctccatgagggggaagggaataaagggcagtgagtacctttgaatggaaacatctctctagctgcccctccagtgccccgaagtgtgcactttctgagaatcagatcacagccccagcgctaggaactctcacctccccactgcagatgtctcactcagaccagagggctcagggcacctgtttccctctcatctcccctctcctgttggttccaacccctctccttgtccttctgctgagccctgctaggccccctctgagctcctggagcctcaatgacttgtctgtccatccagcagggttcctcctgctgtgtgcccaggttcaatctgggcccagcaacacccaagcagacccccgctcctcctactcttcctgtccccaggaaatgatccactgcatcaagagagagcacagcagctcctggagaacagggacacccatgcctgcctgagagctggaaggacagaagtgatcggctaggttgaggcctcaccttacagacaggaataccgaggctctgggtggctgccccaggcttcctgacagtgggttcttttcatgtctcagtgggttgcagggtgggcctaggaagaggcgctttttggtcttgctcagcccctgggcagagctctctgtacttggagtacagtctttgtagctcacagaactcttgctgctcctgctggttcatcctacagcagagtgggcactgggctacccccatcagcctttgcttcatttccctggctctgagttttaggagagcattgccacagtgggagggagtgggcttgagtcagcataaggtcatcgtttgcctcctaaccttgggtgttctccagaatctgtctcagtgtgtatcagatgctccctgtcagtatcagaaaaaggacatctgggttctgaaccacggctgggcaaggaagagagatacctgtttttcagataaaccatgggaagcacagaacaaagattagttcacttctggctaaatttcctgtctcagatcaggctcaccccaggactggcctgggtaggactgggaggaaggaccttctatggtgatagctgggtccaagctcagtctagggttgatactgagtttcctagggtgctgttgatatttgagcagagacctagacattgctatgttcaatatacagttggttctcattatctgtatcagttgtgttctgtgaagtcgccgtgaacactgaattagtgaacactgaaccattgctcctagggaagacacgaggttaggttcctgtgagcctcgggtcacattttatcaaccagtcaatacataaccttgtcatatgtttctgtttaaagacaccttatttaatacatgttgttgattcattaacattgaactcatggccatggccactgtcactcttcctgagcaaagcttatctaacacatgtgttttttctgtgaggcacatcacagctgtcctaagctaaggaacactagccaatacttcagaacgatgcttgggggccctaccaaactgcatagtcactagcaacaagcacaaaagtgtaaaaaaatgtggtctggaatagaccacaaaaaaggtagttgtttatagtatgagagttgaaacaagaattttagaacaatgtacatgataaatatgacagatgacaggttttttttttccaattaaaataaatgatttttttttaaaaaggaagaaggcagatatctccttgttgagtctcagctggaaacgtgcctctaaggtcacattttgtcactctacacatggccctaaatgaccaggaaagtgccttgagtcttggttttggcactgcacataaattttagaaagtaagtgaattcccaaatacagaatctgtgaataatgaggatccctctgtcctctttagtggaagctctggattcctggtgcagaatatgatctcgtgatcatatctgctcacagaagctcctgataccaggttatccgcacagttgccagatgggatgactctctggtgtgttggaggcaagtttcctctgggccttcagaataagtgtccccatggaagcctgggagccatggagagagctatggggcctggtgaacatcctttggtgtcaaaacaaagcatagccaaggactcatcccactaggcaaaccatgtggaggaagtcttccttctagagccctctagatttgtgattcaaagtggctattctcaggatccagacggttcttcagtgtaaacaagaaaaggttggtgaaaatgggaaggcagcaggtttactgatgagacttgaaggagcaggggaaaacaaacaatgccttatcagaggaaaatcatgagatgactccagatcatcagaaccctctgatgctggggaaagtagcccttttaaagaagtgggactttctgttccatcagtagacagcaaatggctcctaattgttttcagaaaacatgagtggcatgacagacaatgagcaggagcattgtagctgcatttgtctaatcctccctctgctaatcctttggtgactcacacagacagggtgaaaggggacccaggccagtcctcagcagagatttactggctgagccagcagcaggtctctgattaaccaagccttcatcagtcgagggaacagactccaagacacatccctgtgtgcgatgagccactatcataaataattaaagccacatgcatcttggcatataaataagtggagagtatttatggtgtggcagataaggccagggtcactcctttagggggatggcaagaaccaggaaggttaagagaataaaaatgctcacattgtgaatcccccagggggtctcctcattctgattcccttctttgtcccatttaaaaatgtgtaatgtggggtggaattgcatgaacataatgctacctgacttcaccccttatttccccatccccccagtgatggattaagcacaaatgtgcttttctttctgtacttatgtatttattataaacagtgggatctttctgatggaaatgattaggatgctggtcctctccttgcttctcactttctatctgctttcaatctggtccatagcatttttcctagcatgtcaggctgcaaggatatttagagatcacctggtacaatcccttatcagatgcttgcatccccacacctatgttcccagcaagggctctgcatttgacattgtctttattctgcatttatttagcctttccagggattccgaaagagcggaataaagatgctcctagtttgcaatgtatacagaacccaaagcctaataaagcccccctcattatttttgtatagccctctggttcttgagagcatcaggaaatggatacagccctcctggtcacacagctgaggaccctagactttgggccaggtccgatagaatgagaagtcaagggaccagtccagatgggtcacttgggagaagctaaaagttatttgtagcaacattggaccctcagttacctttgtcacccatgtggcagctctggactgcagtaagttgttcatggatgagggctggactgcttgctgctttctcaggagtcacacattggccttttcccataagccagttgaaaggcttcttggttaatcttaaggatgaacagggttctctgttcatccttttctccccacacccatactcttggttgagaaaacagagaccatctggggagaggcaactgcctctgccccgtccttctgtccttgggtgtccttgtcagcctttgctcccatgttgtccctgtctcagaggaagcagcgtctccatcttcccagagtcatcccctcccagccttcccagtctgggtctgcaaagatggcctgtctccatcctggttggcccgccctttcctctcttctcccccttgaggtagtgtctgtctgctcctctgcccatcgccacacctcttgtaggtctctgtcctgaaggtccatctgtttcttttccccaggagcccctccactctccatccaagatcactttgcaaaacctgaccatgttcctttgagcttcctttcctccttagcatccgagtcactttccactgtgctgatttttccccttttgtctatttaatccatgtttattgagggtttgtgtcagcctttcttttaggcactggaaacactggggaacaagagacacatggtctccaccctcatgggctcacgtccaaccatagctgaacaccaagacatgggatggcgccccctgctgcaggaccactgagagcaccttgtgccctccctccctcccttcctgtcttgctctcttcttcagctttctgctgatgactcaccagcctttattccttctttccagatcatcattcccacacctccagccactaccttgaaatgcccattttccctcctcaccctcactccctctcctttccttccacaccctgttcgtcttttaacacctctttcatttctcgcttcttgtgaattcttcctagccccatgctatcgcaatgggacctttccttccttccttctaacccatagcttagtcagtgccatgccccagtcttgaatgactttgagccaaatcataggtcagcctgccgtttctcaaatatacatgtcctgtttcccaaacccgactttgagtttattcctagtgtcataattctttattttcaacagaaaccacagcatggaactagggtcaaagaaggtgctaactaagatgtgtcagatgactccacgcccaggctctctagaaactcagagaggggccaggcacggtggctcacgcctgtaatcccagcactttgggaggccgaggcggggggatcacgaggtccagagatcgagaccatcctggctaacacggtgaaaccccgtctctactaaaaatacaaaaaattagccgggcatggtggcaggtgcctgtagtcccagctactcgggaggctgaggcaggagaatgtcatgaacccgagaggcggagcttgcagtgagccgaggttgcgccactgcactgcagcctgggcgacagagcgagactctgtctcaaaagaaaaagaaaaagaaactcacagagaggaaaaggaaaatactattgatttgtatcaacagcctctttagagcaagcactgggctggtgttttatgttttttttcttatgcgatctttaactagctctctgagggggagctactactcccattttatagctaaagaaactgagactcagagagcttaagctacttgttccagatcatacaagagagagcctgagatttaaactcagacccgctacctccagcatccatccctcccctatcaaatctcgttgcctagacttctagtgattgacatatactcagcaaggctggaggtaagggaagcaacctattaaggacagttcttttgttttgtagaggctcattcttctgtttctaggataaggacagccctgtatagggtgttcagggttggctgaaggcctctgaagtcatgaggctgggccaacctgggtctggctgttggcacttattacccctctctgaattctccatagaatcaagttcttgaggggccatgactgccttcagataaggtgatacctggccctggggttaatttttatttattttaaagaacagttttagaataggtttagatttacacaacaatttcagaaagtacagagagcacccacatatttcctttaagtccccacctgtcactacagttttctctattattaacattttgcataattatggtatattagttgcaattggtgaaccactattgatacatttttattaattaaagccgcaatttaagaagggttcactgcttgtgttggacaagttctgtgggttttgacaaaagcatagtgtcatgtatccaccatgacaatgtcagacagaataatttcactgtccaaaatgtccgctgtcctccatctgtttatcccctcacacccttcaatccctggcgaccactgatctttctactgtctctatagtgttgtcttttccacatgtcatattgttggaatcatagtgtgtagccttttcagattggcttctttcacttagcaatatatgtttaaggtcctccatgtcttttcctggcttgatcgctcatttatttttttattttttattttatttacttatttatttattttgaaacggagtttcactctgtcgcccaggctggagtgcagtggcgcattcttggctcactgcaagctccacctcctgggttcacaccgttctcctgcctcagcctcctgagtagctgggactacaggcacccgccaccacgcctggctaattttttgtatttttagtagagaaggggtttcaccgtgttagcaaggatggtctcaatctctggacctagtgatctacccgtcccggccttccaaagtgctgggattacaggcgtgagccaccgtgcctggcctgatagctcagttattttattttatttctttttgagacaaagtctttcttgtccccatgctggagtgcgatggctcaatcccagctcactgcagcctccacctctcgggttcaagcgattctcatttatttttatcactgagcagtacttcattgtatggctgtattacagtttttatttcctcacttagtgaaaagcattgtgttagtttcttagggatgccggaatacagtaccataagttgggtggccccaaacaacagaaattttttatctcacagctctggaggcccaaagtctgaaatcaaggtgttgacagggccatcctccctctgaaacctataagggaatcaatccttcctttcctcttcctagtttctggtggtgttgctgggaatctttggcatcccttggcttgcagctgcatcactccaaccctctgtcttcataagactgcctttttgtaagaacaccagacatatagttttaggggcccatccttatcctcacttaagtaatcacatccacggtgactccatttctaaataaagtttacattgtaaggcactgggagttagggctttgacctagcttttttgagggggacataacctgtaacagacaacttcattgcttcctcttttgggcaattataaataaagctgcataaacattcatgtgcaggttttgtgtggaaataagtttttaactcatttgcataaatatctagacacgtgattgcctggtcatgtggtaagaatatgtttagcttcataagaaatagcaaaagtgaatggttataccaagtgaggttcattgcatttcacattagactggctttcaccaatcagctcctgcccgagggtctcctggcacttgtggatgcacactgtccttcttggtgtgcctggtgaagtgtatgtgttgtgtgtgtgtgtgtgtggccacacacgtgtgattgtaccaacctttctctcttctgctctaaagtataccggtaactgatgactgtgtaattcttattggatattcacattgactaatagtgagcatacttcacttctaagctgtcatcggtcaaagaccaattgccatgtttactaaaagactggcacctcttggtaccaaccaatgtgtccatgccttcacagcatttcaaaggcagcttgtcagggtgattctccatgatgtcagccctgaaccccacctttccaggcatcctaattcttttcactttcccagaagtcttgttgacactttctctttccctacatgtcactttcaagctggtttccatgctgaatccatttttccacatgagtttctagattttaaactatagatgtgcattcagctgctcctggctggtcaccccttcccatttctttcctagatctgtcctacatcctccctggctgacctggtagctctgtcttggcgtcgtcttggcccctcactctcatgacattgccaaaactccatctctgttggttctcttcaacttccttttctcttttactccttcagtcagtcaacaaacatccactgatcccttcttaagtaccaggcactctctgttaggccctggggatagagcagacaacctaccctttcttacccctctttagctacagagcagtagtgtggagttcctggcctcactctctttccctaggaaaactgcttgatgcattcccctctaacatatcagcccacaaggcaaagaacatctgcacagataaccaaagctggaactgctagatctgtgcactgtctctttagctgggacatcagagtgtgcaagcggcttatctcctccttttcttctgggtcaattaaccatgaagcttgctttttctggaagaggaattgcccaggccagtttccagctgtggtggggagcacagagcctgtgtgcataatgcagtattaacagtgcatcagcgtgatatagatttctgtcaccttctatgctaacaaacatcgcttagcgtagggtaatgatgggtgtttattcccagccacttaactcagcataatggacttgcagatgaaatacggaaaatgggctcctttgtctaggaggctggggcccttcctggaaccagtaacagaggcaacagcagcagctgctactcctgcagaaaaagtctttctagttctttctctagaagaagtccgggatggacttgcctgatgcaaagaaggagatctggttacagggctgggctgggagcatggggtgtgcggctgaagagggtaggttggcataccaggggctgctgttagcttcctgcggttgttttaggaggcaggctctgctagatgtgacatgggagagaaataggaccaaggtgggtgggggattctgatgggtcccctcttttattctcctggttggatcttgacagtccactctaggggaaccataagatgaatcttggtgactcttggttaataatggaaacatttagctttaacctttttcaccagttcagtatctccaggccctgcttggtaggcagtgtttcataaaacattttaaatggacataaattagtattgtctccctctgatttttcttcaatcttatcttcagattcagttagaataactaggagacccccaggaattctgtgatgctaggtttggtaagcccaaggtctctggagggagggatgagtctgaagacattactagtattctttctttgtagaaagagctggatgttgccagaatgagatatcttgggagccaagcaaataagtcctgggcccatgggcttgaactttagtatacatacaagcttgtccacagagtctcagcctcaagatattaatctctgctgggtgctgatgtctgagttccctaaatgttggtacaatccaagcatagcactttgacatttttcccccattcctggaagaaaaaaatcatatgaagccatttccctgaaattaattgaaaacactagactttcctagcatgcactttggagctaaaaccaactagttcaaagtgacagattagcattcatctccctgggccgagaccacctgccatccttgtggttatcatgacctcatctgctctgtgcctcactgccataatcacatactcaaagttagtagctgcatgcagtcatgctaattaagtaattaggtctaattatgctcactgtaaatacaaggtaattggctttaaaaaagtacttgagggataagcattcacttcatggtcgaggaggggaagaatgatgagacccccagccagcttggagtaatgtcatttcccggtgggatgggagcccaggggaagctgcacccaaaagctgaaggtgggcagaatatggagtgggtcctttctgttttgctcagtggcctagaaacagaaggactacttgtcttcctggcatgttttggcttcagtcttgtcttcaaggagtaagaggattaacttttctccagagatcctttctagctcaagatttcccagagataagtaatttatgttttttcttcgtcaactggattcaggcatccagtctgtattggagttttaaagggtcataattctgaaccaggtaaaacatatacataggggtcagataggaatcaaaagatgagcattattgttgcgcccaagaaggcagcttgggcgtaaagccaaaatgggttttttggtgcttctcctgtcttgaacttggatgtacagatagaacttgggtttgctgagcagatattattcattcagttgcatggaaggtcatggtttaccttaccttttggaagccagagagcttaagaacaccccaggaagctcatatgcacagggagagactccctttccttcatgaactttgcccagaagagaaatgtgatggtggatgatggactccgccctcatcacccatcaaataagtcacttgcttttcacagggagaagccaggaatgcagggtaagggaagggcttagggttacttcccatgtctccaaggagtcagacattcttattttaagggcagaagttaaaaatcagggaaagggaaaaagatctccttctcccacctacaagcaggaatctcggtagttgatggtggtctctattagtgttctctttccaaaagcccttttccaggagaaagcagtcatcatctccatcttgctgtgagtgaacacgtgagtcataccttatgacagatgtcccaaagaatttgtcggttctcattccccttgcactatattgttgatggtcaataactaaaaaccaaagctctacctacatcttagccaagaagccaagagtacaactgctcttccatcttctctccagctgcctttaattcattgttttgcaaattgttctctgaaggatacgaataggcattgcttaaaaaaaaaaagtttcatggtaaaataattttgggaaaacctggattaagtaactttcgtactgtaggattctgagagcctttaattctagagatccctgagacttaccaagaaggacctttggtctgcagcacttctcaaatttcttgagctactgaacctgattttgaggtatacctgttagcatctctgtagacacagatgtttcaatggatcccattcagggctgttctggggtttgggggctccattgttgcctccccagcaggtgtggtcactcactgtgacagtgcccagatgggcctgaacccatttggcacaggcactgtcacatttcctctcaagcccctcggagggacaggacgtagctgcattccgtgggaatagcccgaattggggtggtaacattcttcaggatttctggcagagcactaagtgccctccacttaaatggatcaggggatctttgcctgttgttctcttcctagaagctgttgcaggtgcttctaacacttcctaaaccccagatccggagatgctggtcatggccaaattttcactgcattcctcgtttccaggcagatctgctgcctcttaggaatggaatcttagggagctgctccaaggagaaatgcttaaatcaagatgcaggcagctttctcaaagtcactgtttccaaacaattgttgggaaggtcaaaacatcttatttaaagaagagaatataatggtcttggcatggagtaggcagggtctagcggctgagagaatgagctgaactagggggttacagaggatcctttttcattagaaacaaaagtgacatgagagtgggtggccttagacccaggtcccagcctaccactcagccactgcatgactgtgggcaagacacctgccttctctaaatttgagataagaaaaggtgaccaccttggcaggtatcttttgagatgaagcggtaggagaatttgaaaatactctgtaaacttgtataagtgacaatatgtgatcatccttgccttgacagcaatatttttacaactatcattacaatttctgatataaatatgctgttgggggaaaccagcttgatggtactgaaaaatatattttccaagcttggatttatttctgaaaaaagaatcccctccagcgacttctttcccccaactctaagaagcagcattttatcacccggctccacagctatgaagatgctcttaggagtcggaactgtaatatgttggttgtcaggaaatgatggatgtagatgagcagagggctcaggccaatttccttttgggttaatgagaccgaaactctgtgggctcaactagaaggtggcagagagattcatggcgagattcttttgtttgtgtttttgtttgattgattctttgtttcacccttccctttgtcatcaaacttaattttgttgaaacaaattccccttctcccctgtatgcctgcccatgtgctttacgctgagttctcatatgtttgtgcctgcacggtcccctccgaagttagggcttcaatgtctgtctgcttatttgacttcgtttttgcttgtccttagacatgagtgcacagcccttttgttttttcttagcaaacttacacataggatcttcagacacaaatgtacatatgtctgagtcttgttcatattctcatgttttagacactgattgtatcagttgagatccttttgactgaaagtacaagataatcctgactcacttggcttaagacgttgatcatcacataactcagctaaacagctagggaaggatcctgatgaagtgtattaggactctagctctactttttgtgattctcctgcctctgcctttctgtattttgctatatcaccaggttaacttctctcatggctacaaaatggttgcagcagatccaggcatcacaaccaaacacatggactaggggccccacagggttgtcttttcttgtgggtgggttgaaactgagaaagcttttcccaaagcccctaagtagtctttcctgtttcattggccagaattatgtcatatgtttattcccaagccagtcattcttaaggggaatggaattacccccaagcactttaagctcctccagattctcccctggggctgggaatggaactcattttccctgaggcatatggttgcctggagggcatatgtctccatagaatcacagggctctgttagcaagaaacaggaagtggctgttagaaatgacagtacctgccacccaggtctcctccaggagtaaagcaaatgctcacctaggctttcagccttgcaaatactgtcatcctgctcctctaggagtaagcaggtgcctcttggggtacagggggtagaatgaagatgagaacattgataccgtgtacattttactccttgtatctctcctcttagggagagcaacctagtaatttgttgttgtcatcatcactgttctggtctggtaaactgtcctgctaatgttcaaggctagacttgtatgcctgggtgatgaaacatttctgcttgtggttttagctggatccaactatcttggttgagcaagctgtgtgaattcctcagagctgctatgtgatcctttgggagcatagcttttggagagtaggtgggagcaggtaggtggtgaagagaggggaaaagggggagtagtaaaaaaataaagaaatgcattaacatttactgaatacttaccaagggccaggctctgaacttgaagtacattcaaataataataaaatcatacactgcgtagtgctttttatatcttaggcaccaaaatcagtttaaatataataataaattgtttaatcctcataaaaatcctatgaggtagcttctattactttccccattttgtaggtgaggaaactgaggcacagggaatggttaaaatgtttgctaaagtcttgcagctagaaaatgacaaaactgtgatatgacagagcccaccaccccctcttcttttcatgaagtcattctttctacattaaatcaagctttaatgtaagtgtagtgttccccactttacagattaggcatttcctagggaagcaaggaagttaagggacttgcccaaggtcatttactggtcaaaggtagagccaggattcaaactctagagtttaggagcatgccacttctactaacctgggataccccctcccaccgtcagctgacttccaattcacccacacccccaccttttgggagatcttggagactttcagacagataccagtttgggtgacccatggtgctcaccagtgaggcagcagaaggcaattcctctctagcactttagctcctatgtagtcatccccctccgtgtgtccaccccaggaggctctttggagcttcagatccccatgaggcaggcctcccagaagcagggtccagctagagatgggcattggtggtgatgcaagagctacccttgaaggagaagagcagaagtccttggatccaagttgacctatttttggccgagtctccttttatcctgtcgctggtggatctgtagcttgatttgtcacccagattgtggctgggcctctcagcaggcaatgtataagcttctgtccccagacctagaattgctggtgatatagcaactcttcgcattggattctgctgagtcgagcagccctcatgccactggtaatgaagaagtgttgggattaaactcctaatggctcattgattggttgaattatgctcagtgtaattctgaaaatagattttaaatatgtgcttggggatttgtggggatttgttacttaggagctttaactaaatcatggctggtttgacagagacatcaacacagggagcctgtgcctgggatgtgatgttcatctctgggtgacccctctccccctattccccaaagtcaggaaaatgtgctgggtggggtggctaggggtgggatggtcccccctcccttcacatatattcctttgttcaggtcttgagaaggtcagcttggttgaaccaaccactgcaaacccctcaatattgctaaggtgagatggagacatcacaggttctggattctcccttttatttcctctgaagttaagagcagaagttgtcttctttctaactccaagctttcacttttcctggagctgccactctggggaagaaccaaaggggaagccttcatggatgcttagctaatcagccttttggcatattctggtgccgtcttttccttctgcatccttgtatcctaggtctaaagggggagctgtatgaagggttcctggtcttgggctgagcttctaacatccatgcttcttttggtgaatgccaagttaacttggagacaatagaaaagctaatgaaggcccctctgtgagggagcaatcattagaaaataataatcagagacctcccagcacaccccaaatcactcaccttatatttctttccctctggtctatcagaaacctaaaatgcctcccatttttggtgcaaggtagatcagaaagaaacaagggatgttgtaagtgaggcttaatgaggcaaatttgaaagatgcagttagaccatatttccatggggaatttggtcaggggcttttttttttttttttttttttttaagcttcgtctcttccattttaacctctgtctgaaagggtatattccccttccctgggataatttatactcagccagtctttatgaaagaaaaaaaaatatccccagagaagggaggaagtaaaaacaaaacctggaagaaaagaaaaaaaaatgacactctcctctaataaagaaattactgacgttctacattatgaactgtattaatttttaatggctgagaaaggagttgatttataatgcatccttcccggctgcaaagcctgtccccagctaataaataaatgacaggtctcttgtattaaaagtatccatcatcttacagtgttggaatgtaaatggtgagaggcattgaatgagaggcccctgggagggggtgtgccctgctgtgcccagctggagaagagcctgccatagcattctgcttagttctgacacagcttagcccattccttcatcttgttttcagcaaagtgatccaaatagctgcaactcttacggtccaggagaaagttcataagaaaaggtgatgggccatttaggaacaattcatgatgtaaatttaaattcctggtgtttaagcaaaactgtccatggcttctccttacatatcctcagggcttcctcattggcttcccatgcatctctgggattatgtgttcagtagttcatcctttgatggtggtcacagctctggttagcctctctatgtctctttagaaaacagacagaacacctaacatttgtttctggtttcaaagtaatatacaatcactgaaaatattttgaggaaaatccagaaaagtgaaaagaagaaaataagaatcatccctaatgccaccccaagtgatgaatgcatgacattttgccttatatgcacaggctaataacatacgcagacatgtacacatcaacatggacatgtatagcacacacaaatgagatcatattctgcatacggtttcataatctgaatttgtcatctagtagcctatcatagacctttatttcacaatgccactatttttaatggctacataatacgtggccaggctatattcacattggagccgctgtagagctggcgatcagtcaatcaagatgcattccttcgttcttcattacagtgccaactccagaataaacatagtgcaggagaaaaactgagtacaaagatgatttttgcacagagctcctaatcttggagcaactactatgctgcagagtcaatgcagtgaggctgagagatgaacagagtggcatcatccccgcatgagggagtccacactccagctggggagacaggccaggaaacagttctggagatatgagcataatgagatgcctgccacagagaccctgcaactaaagggcccagtgtgcttagagagcagtggcttgtttaaattaggggagcagaggcttgggtaaaggctccacagaggggagagtgtttgagctaggacgctgcggggaaacttggactggcagagatggacaggaagggccttccaggccaccgtagcagtagcaggaggcagacagggggcagggtttggtgggggcagggctggaggtgagtgaccagagaaggactccctcccggggtggagggagcaggtcttgttgatgtattaaatagcatagcttattgacacaataattacgaatttattcgtagaatttgcacttacatagtccaggcctttgtttatcacgcttgtcactgtttctcagaagtaggtgatgactagaggagtgaagaaactatcaacactgtaataaaaaaggtaaaacaaagtagcaagttattctctctgaatttagggacagttccaggcagacatagagagacccctgttccagaaagaagagaaatgaaacactcactgaatatacctttcagcacagggaacgttatgtagaaaatgagagcgatctagcagttgctgccagcaggctccactccctctgatttatttatattgtcttcataggcttataaaaatggaagtttgcctagatttggagactaacatttctatcctttcacatatgaatttatttcttgatttgttgtgcatatttctaaacatagatcgaccaatgacttttgcttttggaaaaataaaaaagaaaatctcggagctggtgagaagaggaatcagagaccgtgttcctgcaaagaacctgctccggtgttgccggagaggtaggcggggaagcatccaagaagcatttattccttgagcacctgagagagcctgtttttttggcaggtggaaaagtggcagcccaagatcaagtcctagctggtcttggttttatcaccagttagttgcagttgcaatatgatcctcgcttatatttttgccttcaaatcttggacccaaaattattccagcaataggagttggctgaaagctaagtttttcctttcctgctctttaattctcattcacttaacttccttgtagaacatagaagtttttttaatctgaaaaatatctcagagatccagtgagacttatcttttcgtttagtagatgaggaaactgagggccaaacacatagttcaatgatattaaactgcataaggatttggaagaaggaacaggtctaggaccaatggctgttgtctcatgtttctcactcctgaaactgtaagtggaaatgcaatcttttcattttccccaaagttgatgttttttgtttgggccatttaataaggaatgtctgacaaaagtgaactgtctgactcaggtgcagtaattgccacagaaattggttttggtgtctttggggaattctgcagttgaacccagaaggcatccttatcaagtagcgtgttccaacacttttacaaattctaagaacctcagatatcactgttttcctttggagcgatattttgttattttagtaaactttcaaggggcactgccactttgctgcactggcttcctagtgagatacagtgttactatcttaagtctttttttaaaaaaattgagacagggtctcactgtatcgcctaagttggatggagtgcagtggtgtgatattggctcactgcagcctcaatctcctgggctcaatctgtcctcccacctcagcctcccaactagctgagactacaggcgcaccaccacgcctgctacctgggctcagtcaatccacctacctcagtcccccaaagtgctagatttataggcatgagccacagtgcctggccaagtcaggccctgctacaggattttttgtacatgatctgaaatgttgtctgcacttgaaggatctcttagaagggtgtctgagttcctactggcattgaaaaggaaggaaacttgaagctaggcatctgtttgattcccaggctgctttcatgttacttaatgctgtcagatcataaagggaattcatttctattcctcaacttctaaataacttcacacgatttacagttgacaaacagcacactgggactcttcttgcatttcattgtttctgtggaaaattggttgatagagcatcaccaagtgtatggcttcttatcctcaggcatttcttccaccaacactggcgatggtccactgtgcacagagctctgggttagagaaggaaccctgttccttttttccacagttctgttatctggttacgctctgacctagaggaagatgcgggtatgattttaaacagtctttaccagtgcacggtttcacctgctggtagtgggtctttaccagtgcacggtttcagctgctggtagtgggtctttaccagtgcacggtttcagctgctggtagtgggtctttaccagtgcacggtttcagctgctggtagtggggctttaccagtgcacggtttcagctgctggtagtgggtctttaccagtgcacggtttcagctgctggtagtgggtctttaccagtgcacggtttcagctgctggtagtggaatttcagaagaccgttgttcttcgaagtcaggggttatccaagtgtggtgtgcagaccagcagcatcagcattaactggaaacttgttagaaatgcaaattctcaggattcacttcagacccactgaatccgaaactctgggcatgggattcagcagtctgcatttcaataagccctctgggtgattccgatgcacatcaaagtatgagaagcacagtataagatattggtgtagtttcctttttcccccgatcaaaaatatctgaagaagctgagaagtgcttcaatatagttactaatagtgcattataaaacatttatttatttagtaaacatttattgagcatccattaagttctaggttctgtattgggtgttaggagcacaaataaaccagcaaatggctcattctgctgtggttgttttggtatgaacatatagaaatacttttttgtgacagtgatataaacaagaggttctcagcctcattctcaccctgcctgtgatttccgtgctatttctgggcctctccaaatgggcaagtttgccaaagctcggggtcagagtgtcctgagtgagaaggaggatgtaagcaaggcgcaagaatgagccatggctgggggaatgttgccagctctgcattttatttgtgaataataaggaaggaagtgagaaggtttgtgttttaggttgtgttaatacgtttcccttatgtcaaaaccaccaactcctagcaccctgtcaaaatggctgcactgaaatatcacagttcgtcgaggatctcattgtcttataggttcgtggaggatgtagagatggcaggatggcagccaaagagctgaaggtgggattctgtgaagaacaatgcatgctctctccttcatgctgcacaaggccgtagggtacagggtgggtgagctctgttggcttgaacattggagcctagacttgctgctgtgctctctccccatgtttctgtgtgtctgtcataaggtgggactaatgggaggatctgcctcactgggtcttcgtgtgtgttaaatgaggtaatgtacgtaagggatttggaatagctgcctgtgtttaggaagaaatggctcacttctggctgtcagcactattaccatagtctgccttagttatactacagaagaaattcacttctgcactactgggtcaccccagtggcaggcgaagggaggggcagtatctggctgtgcagactttccctgacattactgataaatcaactttcccatagagtaatgtgcggtgggaagtgtctccccatgtagaagctggtgtcctattgtgctgacgtaattcagtggcctgctcatgcatacactgccaggatgtgtatatcttcagctgcggcttcttttcagggatagacccaactcaccatgacccaaccccaaacttcacctcattgccaaagtcaaggagaagattttgccagaaaatatcagattactgagattttaattatgatttccaaatgttctgaaattataggaaggtagcaaatgccccatagtgtgttgagttgagacatctaacctcttcctgtttaatatggaaatgtgcatattttgtaagtccttacagacttactagtagagtcacattctcattcattcccagataaactttcttaaatcctgtctattttgatttcttaaagcaagctggagactgagctttctgttggtgatgaataggaattctagacagcaagaagcgagaggctgacctggtggagggaacaacagatacaaaggtgtggaggtgttttctggggacactcaggagctctggatgagtggggtggaaggtgtgtgggtgggatccagtcatgatggcctgtgtggcatgcttgttcattccaagccatttgaagataatactggataagaaaatatccctcaacaacccatggaccaggaaggaacgaaaagaaaaacatgtccaaaaggatggatttttttttatcccttcatgggtagtgtggtgtgacggcaaaaccctgaactgaaaatttgcattttgggaagtcattcatgtagggagtgaattagaatgcaagccagatccaggtaactgctgtgaatgcatgatgtggtggcaggtgaatgagttaggcacacggagatgtgtctgtgagtggtacaattagcccggctgtttcccaggttgcttctagtgtgataatactttgattttgtgtgtgtgtgtgtgtgtgggtgtgtgtgtaaattccagcagtgctagaggtaaaaatacatttagcaagttctgttattggctcttaagtggacaaaaatataatgcatattttaaaaataaaattctccttattcaataggtttattacattgcttttaggaataaaatctgttagtaatatataaatatcttcaccatgttattcatcatttgccaaaaaaaaagcatagtttcattcttcccatccttttccttttcttccggaaaaattactaaaaagcttggaaaaagaactaccagtttattttacataaattgttctcctttccccaggatactcatatcttaaatcattatagaggcggtggttggagccttgagaatgaattcacccagaatgagaaattgtagagaagacccgaagttccaagccaggaccctggactggagccgtgttttagagaaagaaaagaaaagcagatggcagggctattagaacgggcaaaggtggaaagagttttcacaagagaggtgatgttggaggctgaaggagtagacagagactggaccctcaagttgggttaggagctgaggcctggaagcctggactacaggggtgagggagatccctagattgctgggatctagagggggctggtcatgccaaaacaggccagagaacagaataaatggacaacatggccactgagcttttgctttgtagatttgaaagagatttgggggcaagctcgacatctaatcatttggaagaagatttattctactttactttctccatgatgttttttggcttggataagtttggtggatctgaggacaaaggaatccactatattgtttggaaggaaaagcagtctgtagtgtgcttttttctcactggatctgaggagattctgagaacaggagcagaggtgcctcctgtaacactgcagtggagagaagggtagaggctacctgtcctagtagaaaagtctggatttgagtttcaactccagctccagtgcttacaagctgcaaatcctttcacaggtcatttaacatcatatctgcaaagcagcatcttgtagggctcctggaagatagacaggttgcaaaacagcagcaggagggtcatgtgcaccctataggggtgtgtcctgtggcctatgcagagcgtatcattctttttgaattggttgctagcaagtaaaacttgacaaggttcacacaaaaaaatctctgcatttccagtttctcttgaaagatagaaggatctgtcaaaattggcttgcatttctgcatggcaaccattaggtggaacgtagaagcagtggacctttttccagagcttgtgttcccctttttgccagagtctccttttctccttattgtcttacacccaactctttctgctcatctacactgctcacctggcttttgtggccattttagtttgtgattctctctctccattttaaaaaaataaggaataaaggaaataaatgcaaagtgttctgcatatagtaatagcttcatacattcaatgttagctaatatcatcatcatcaaaattatcttcatagttttaagcaatatgaaattaatgtccctgatatgtcactgaggtaggggtttctccattgcctctttagctataagcctcaaaaacatgcagacaatgacaagtctcttcccactcaactggggatctcttccttctcaactagaggtcccctggaggcagaaagaaaacaaaatcaggaatctgttcttctttaacctgagagtagaaatccttcttcagtcctaatttttttcttctctaggcccgaggggggctggtctgtgaagtctgggacatctgagctactgctaatggaaagggaatcttccagcagggagagtgaagggaggtgctaaacatggaggtggatcttatatattccatttccgttagtggtcaagataatatttcagtaattgatatgcctttatgaataatggagtgtggatcaaaagaattgtagcgtctgtttaatatgaagaatcgctgggggccgagccctggttgctcctcatcagaactgcactgccaccaagagccttgagtgtcaggagactgggactcagaactgggaacttagtagaatttaaaatgtgaagcacttaaaggtcatatagttccatggatagtaaatatgtgtcctcaggaatctgcattggaatcaaccgggagcttttagaaaccactgtgtcctagggcctagggttcttggaccactgtgtccaagaacctcggagatcctggttcttggtctttgtgtggggtctgccagcttctctcggggctcacatgtacaagtgaatttggcacttgcatctactcttgttgctttacagatgaggaaactgaagccctgagtggttaagatacttgccccaagagacctagtgagttggtggcattggtagaaatagaaccaggtgtgccccactttcctttttcaccttaaatttaccagctaacattgaacacatggaacttctccaagagccaaccctgttatgctctaaggttctgggagtgtatttgctctctgtgagttttaggattctgctctttttcttcttctggagagatccaacccaaattaattttagttactttgcttcaggggacacttctcttctgaataggaacctctctctagtgtatgggaatagttttgttcccttagatctctgtatctctagagatatgtggccaagtcatcccagtagataattccttggcaaatcttctgtgcccatgattctaggaagctacagtcataaaggagcattttcttggtaacaaaggtctagaaatgcagcatcatagggtataaggcacgttaggggtcctattcatccacccattttacagacgagattactgaggcatagagagatcaagtggattgcccaagaaacacagctggtttgtgtgcagaagacaggaagaattagaactcaggtcttcagattcctctgcccagtgattgccttgatttcaatgagcacatctctggtggtagaatttcacatgcctggaaacaggcttaagacaaaagataaaacaggcttcccaggcacaaaccttctcttgtttctcaacaagtccaagttagaaaatcttaggattgaaaaagatacaacagatccttgtgggtgtgagtctcctgtccatcccttataggtggccatccaatttcagatcgtttttctagtgaccaaaagtcactctttccagagtgtccagtctcctttcaggcagctctaattgtgaaaaaggttgtcctatcctggcccaagaatcatctttttggggacccattccctggtcctgattgttctgcctgaaaccacttagccaacagtatggtattgtgagcaggatttgatgctgggcacaactgggttttggttccaccctgccgactactggttatgtgtcttggactagtcacttcagttctttaagccttgcttccttgtctgtaaataaggataacagaatgcccatataggatagttattatgaatataactcaagctatcattgtatcatacctagagcacatcccagcacatcaaccccttggttcaggcttgtccacattttggaggccgggggtcatgtctctcctcacgctaggttttttcatttttgtactaaaccttgccatggcctccatttgtcctcatgtggtgtcagttgacacaggtgggcacaagtgctccctgtgcctctcccagctgagcagactctcctgagatgggtctcagttgctttttcacgcatgaggaaggcaacgttaaaattactcgtggggttatcttagtggctctctgatggtgctgtgttctgaaatccacagtttggaaactagccgtcatgggctgtgcatgtgtgagtctgtatgtcatgtgtgcatttggaagcccagctgtgtgcctctgcgtacttctctccctgtgtgcatgtgttgtgctcctgtgtgctttcccacaaacctcagtgttcaagctacggatgtactagcccgttttcttttacatcaaggagatgctcactgcttcttcaaatcccagaatcatgccatcccatggggcagggctttttggttcatctcttatttccacctgaagccacatgtgtcctgtgcctgtggagggctgctgcccccagatagagctgcctctctgctgaggctgccaccagccaccagcaatcccttttcatgtgacctgcagttgtgcatgatgatctctatcaatcctttttccccaggctcctggtagtgcatagcattgcaccaggtgcttcaggagaaaagctgcctccactgctaatctgaaaagcactttgcctggaaagacacctgagacgtgtaagatattaatagctgcagaagtttcatccctgtgtaatttaaatccctttcccgaggaacactcttacggtgggggtggaagagaaggagagaaaagcctagaataattatgagaggttgtgggaaaaatttttttggggatgactgaaatattctagtttaatcatccaccctggtgcttgctggatttggtaatgaacatttttactttctccttaaagtcagaggctattttgacagctacagatgctgtaaattacaagtgttctgatatggtcctgtgagaagctcttgaaaaagtgttccactaaataagtttgggaagggctgtaaataccatctgcctcctagtgagccccagtgcacatcggcatttgaggggatgagagatccttcctacagaaacctcttatgctctggttatccttggatttaccatattgatgtgaagatagatttcctcaaatgtattgccctatctctgataggttgctaataatgttcaagggtaaaaactttgttgaaggggaatggaatgttatggaaattgaagtgtagactgtgtagttgttggggtagatgggggagggtctcaggcttattttggtaagagagggagactgcctcctagcacctttttctgtgctctggcccttaggcagtgggatatacagatgtcaggtattccaggatttgttgaaatctctcctttggagagatttgaggtggtctgttccatgcatggagtctaaagttgagacaagtcaaggcagttatcacacagagtgcagtgggagagccatgcagagggtaagatcaggtggctttgtaaaggaatccatgcagaacagtgtgttttagggcggacagactttaggctttaagggcaggccctttgctggacccattgacaaagtcactgacagctgtttggaacaattgcctaggaaagcctgtccccacaagactcttgtcttaacacaggcatcctaggtggtgatattgttactccatggacttctctggggccatcagaagtcctgaatgaactgggggtcaagctcatgaagcatctggctcctactcaggaaagcatggcagcctgtacttaggcttctctggcagcaccagggtgtgtccagaaagcatcaatcagggaagaacagtgtgagtgcctaatgaggatggatcccagtgagcaaagagacccaaatcaatagagggaaaacaaatgcaggtgaaaacctttggagtaacacgaatatagggttaaaacccagctctactttcatacctttgcacaaattacttaagctctctaggcctcatttttctcatctgtaagatgagaataataaataccactttgctaggcattgggaggatgaaatgatttcacacatggaatactccagcactgtgataaattccatccattcattctgctgccacagatcaagaggagttgaatgatagtgagaccatcattcacttgagccaatccttcccctagtgctacgattctgatcctgttcacttttaccccactttttcaagggtgagtctcacagagcttttaagtttggcctctcacactctcccacacctgctaaatccttataaatgtttcttctcttccctcaaacttccctcactgtcttatttgtttcttgccctgtggaaggcagtagggtacacattcttcttagtgtaaatatgccttgaatttgcacaagggcaggacaatgtgttcttttttccaacagctgttttgatgatgcttggcaacatgttggtatttttggcccgagtagcacatattgagaccacatcctcaaggaatactttttgatctctcccaagtctcttttctagactgaatggtttggattttccattgatgaaaaacattccccttttcttgcccacatgagagtttatctgcccgtttttctgatcatctctctcctcttgtttacagcacatgcaaaagtctcttgggctcttcctatagtttataacttttgttttagttttatattacctggaatagcttaggatcatctcagagggactctggcatagtccctcttggagatcagggatgccaggaggggcattaaggatggagagatcaggtgaatagtgaaggagtgatactggacaaattgtaaagctctaaagctccaccaggtggaggagggcacaggtgctgaaagacaagagaggtaagggaaagcctagaatcaagtcagaggcacagcaaacagaagtaccccaagcaagccagttagaccaagagagaggctcattgtcctgtcttttctttcttatgggtgcgtggccctgaagcaggagattctgctcttgaatgggaaagggttttcaagagactctttgaccagttctccatccatgagaatacatctcaattaccatggagacttccatcttaaaaatagccattgagtggaatcttagtgcaaaaaaaaaaaaaaaaaatccaaatatatcataacagttggttccttacacccttgtgcctatttactcttttgaagattttcatgaggtttgacttttccttatggagaaagtgtttgttcctccatatgttatattggcttagcaatgagtgattccctggttgaaactttgttccacagtcctctttcttctcagcggagcagtgcattgtagtagttagctgtgtgattgttggaggcatcctacctgggctcaaatctcagctctgcatcctggtaaccatgtaacattggcaagttacttaacctctctctatgccatagttctttcaccagtaaaattagaccaatatgttacctacttcatgggattctaaggtttaaaggaaataaaacctgccaaggactcaaaacagtgcctggtgcaaagttagctctcagatcatgccagtcaagaattttctctagggagctctgacgcacactggcatacagtttacctgtgagaccttggctctgctggaaaggaccttaacattttggtcagcaggtctacaggttcatagtattgttcaaagctcatagttggctgcttctacgcctcccagtttatctcctatataattgtcagttagatctagaccattctgtgtgtgtgccacacttgtgtgcttcaaaagacaagtgagtggctagcatttgattgccttgtaaagaattagtcaaataacttaatgattttttttctaaatctttcttgcttcttctcaaccttaagcatgccctttgctctgtgattattgggtggaaccaaagattcatgtgctggcacgctgcctttgatagatttaaagtcttctctctgatcttggcggatttttgaaaagtggtacttgaggtctgggactcattgaatatctgatttgagcttgctggcaaaggtccccactccccaggcttccttcctctttctctggcttggggagtctgctttttgttttttttccttcaataggccgtagttgtgataggctgagattcacctggttagtcatgcttgttttaattttctgttggtttaaaggatggatattttgattcataagaatcttgttttctccgggcttctagcaaggttttttttttttttttgcatagcttctcatgttttctgttgagtcttagtttttaaaaaactgtctctttttatttcaaggtgagagttacagtgaaattgtatacctttgtttgttgctttgtttgccattccaggatcaaaaatctatcctaagaattaaagcagagatctcagattctctgaatgtcagcttctagtttggtgttagttagatatattaattggggaagggcttccctaccctctgtagttcctagcaatcttagtcatcagggatgagggctggggcacataaacactatcacagattcaccatttccttgagggcagggtcactttgctggtggaaattttttgaacaaggccttccattatccatccttggctgaacttatgtctttcttttgagattttatgatggtacagttctcctgtgtgagcctgaatgctttatagcttgaggagttgagaaaactcgaaatagtccaactcttagattttcagtttggaaaaaaaaaaaaaaaaaaaaaaaaaacaaccactatccttcagagagagaaaatccctttacaatacacctggccaacattatcatccttctctgggaataattccaatgatgaagagttcacaatctcccatggactttattatatcaatgcatagatatctatactcatttttactctatttttaaatcaaatatcattttcattcaacaactggcatgtatgtatgtatattgattggaagaattaatattattaatataccagtactccttaaattgacctgcagatttaaccacagtctgtcaaaattcaggcctcttttttgcagaaattgacatgctgatcctaaaacctataggaaaatccagaagattcaaaatagcctaacaaacctgaaaaagaagaacaaatttggaggttctaactcctcaatcccaaaacttattacaaagctacagtaatagagacgatatggtactgccatgaggatagacatagatcaatggagtagaattgagagtccagaaatagacttgtacttttgcggtcaactgatttttcaacaatgttgccaaaacaattcaaaaaggatataatagtcttttaaacaaatagtcctgggacaatgagctattcacgtgctcattgtgaacttggaacccctaccacataccatatacaaaaattaactcaaaatggatctaagacctaaatgtaagcattgaaacaataaaactcttagaagaaaacttaggtgcaagtttctgtagacttggattaggtaatgatttcttatatatgacaccaaaaacacaagtaacaaaagaaaaaatatatatatcagacttcatcaaaattgaaaacttttttgcttcagtggacaccaacaagaaaatgaagaggcaacccactgaatggtagaaaatatttgtaaatcatatctgataagggagtagtatccagaatatataaagaacacttacaactcaataaaaagacaacccaataaaaaatgggcaaatggtttgaatagacatttctcaaagaagatatacaaatagccaataagcacaggaaaagttgctcattataattagtcattagggaaatgcaaatccacattgtaatatcattttatacccactggaatggttacaataaaaaatgttggacagtaaaaagtattggtgaggatgtgaagaaagtagaacctttacaccttaatgttggtaatataaaatgatgcagctgctttgggaaatagtttgacatatattcaaaaagttaaacattgaattaccatatgacctaccaattccacttctaggtgcataatagagaattgaaaacgtgttcatgcaaaaacttgtacatgaatattcacagcaagattattcataatagctaaaaagcagaaacagtgtaaatgttcaccaacttaaaaatggactaagaatataatatatccatggaatattattgaaccataaaaaggaatagagtattggtacttgctacaacatggttaaagcttgcaaacagtatgtcaagtgaaagaagctagattcaaagtaactacatatttaatgattcaatttctatgatttgtccagaataagcaaatccataataccagcaagtagattagtggttgtttccaggggtcagaggcacacagggtgatgaataactgctaatggatatggtttattcatgtgtatgtgtgtatgtgtgtgtggtatagttttaaagggtgaattttatgttttgtgaattatatttccataaatgattctaagagaaaaaaaccctgcctggtatacactgccctattggaagagattcttgcacctgaccttgcatgagctccttgttcgattgtgagaattctcagaggagggggctggggccagcatgacagtgttgagggtctgagtactcaaggcaggggctatttactaactagtatggacatatgtcgacattttaacaaagagtgtgaatatacagctacctgtccactattagtccctacctgtgtctaaatcctcagacttccactcctggattaccccactgggggcaacagaaagtgtatatacacccctacacatttcttgaatatcaccatcatagcactaagaagtctgatacttgaatatcaccatcatagcattaagaagtctgataagtatcactatcatagcactaagaagtccaagccctgtactctcagatccctaagtctgtgggtcaggagctgattaaatcagcatttcaattaatattttggagtaggtccttatagaggatggtggaaatttgtctggttctatggaatcatattgcaatgtaatagaaatacctcctccctccctctttgataagaatcatttgtattctttagtaagcctctattgtctgtcccagtgccatcttcctcatctgaattcagaattccatgagcctatcctaagtctgaaagatgtagtcttaaagataaacttttccaatttagtcatgtcctcagctccttatcatgcccctatccacagcagctttttgtgatagggcctgccatattcctcccagggaaatatctacatggctcgatgcatgggaaataaaatttgcatgaaggaagaaaagacatctacatgttatttattcagtgacatcccatttcattgcaaaaaatgtttgaggtgctttgcaaaaatgcaaatgtaatgcaacaaagatgaataatgggagtgacagtatctggtaatagtgggggatacatgtaagaaaataaaattagtggcaagtttagactactaagtacctgctgctagagggaccttagagatctggctctgggcatcctagtggccaaggaacaaaggtaagcatcaaaggttacaggctgtcattcagaggaagaatatcttttccattgttcagaggaatagtgtggggatgcagtattatactttccagcttcctgacagtagatctaacagtgcacctcttaggggtgtttgttaaaatatcctgtgatgcaagtcagtggcttcatgtccaaacccacttcataaagtaggtgggttggcatgggggagagaagctttgagaagcacccacaggagcctttcataccctgggcagactaaggcactgcttggaaatggggatcctttgggaagccccatttttgaggattgattgaattgccttcctccattgcagtacatcacctctggggccttactggttggcttttgcagccagcaatcctcctccccccacactccctaccagcaaggcatttctttccagggttattggaacttcatcatgtgaggcagtaagtcattgcagtccagaacaaatctcacttgacatttttatcttgactcttctgggggcctttaattagcatgattgcagtgcaggcaattgtttcaatggagtctgtgttgctcttggttggcataatggctattgaagtttctctatttgctgtttctggccatccaggaaagattctgattaaataagtaattaaactccctaatgtggtataataaggggtggttggctgtgagtttacatggattaaaaatgcatcagaatatggattcatatagttataaaagcatcactgcttaaagtccaatgtgacttgtttgcacgagagctcccaggacttccagagctctacaacagccactgtatagacatctgaagctggcatcgccactgccccataacacatacagccaccatgtccttggccatgtggccatgatgcacacaactacagcaggcagctatgacattctcagctcttgttaatggtctatgggcttttaggagcagcatcagtatatgttatggttaaacatggaactcagctagcattagtggtcctgattctcccagttcctgaatcataagctgcagtgaaaatttcctacttgtagcagtggttctcaaccagggtgattctgtccctaggggatttttgacaatgtctagagacactttcgatgatcacaatggggtggaggatgctattcacatccagtgaggagagaccagggatactgctaaatatcccacaatgctcaggacagccccccaaaaccaagaattatctggtccaaaatgtcattgcactaacattcaaagataattcctacattaccttctttagagctcatgatgtttttgtgacggagaaggtacaaaagttttatctcccttttacagattggaaaactgaaacttggaaagacagtgactctcccctgtcccacagggctagaccatcatctggttctcattctacagctatttgcacacgttgtgtgggatggtgtgagctttggggtctctacaagtgtccaaaaggggcacaagtgttatctaagtgcctatggcacatctctggagaaactatgaccccaggtttcttacgtaagaaacgtacctcaatttcatattttttccctaggaatcaaagaacacatatccatcaaaagtattgtataatgataacacttgatcacatttgacacttgatacttgagatttttagaataagagtatatgatctgccaaagagaactcatataaaaaaaatatttactgctcaaaatctgtgtgtctgtttgtgatatatttgcaggtaagatttccctccaggccctgccaatttagtggaataacaagcgggagaagggtcatgcagggtggtaagaatgcagttgtattcacatcctcgttgcctgagaattttgaaggatatatagaaggaggagactctaccacagagaatgcatagcaaatgtctcattgatgcttcatcgccttctctctcttcttaggacactcacggctgtcttgttgaatattgtttacagctcgcatttggaattggaatgtaattcatgccaattgttgccagacaattgtatgaagcactgtatgcttcacccaaatatctataatcccttgggtctccaagggaagtatagttatccccattatgcaggtgggaagactgagctcaggaggttactggtgcctgatccacatctgcctaatggcagaactggaagtgaaacttagaatttgcttacattccccttgactacactgccatgttagtcacagcaattacatcttactctttgctcctcatttaggaagaggaaacagggctgctaggcattgaatgtgttgttgtatctcctgcctcttaaggcagtgagtgcatttgggggataataggcacagtgaggtcccaaaagaattcatctacacactaaaagtttataaaataaattgacctaacattaacctcagttcttccactgatcttagcaagtctaaagtggctctaaactgagtagagtataccgcagttcttggaactcagagctcctctgtgtgctgccatgcctggctggaagagccttatttaatagcaagtggcttgcctcaggtctgatgaaataaagtcaagggcatgaggtttctaattcatagttcaagcattgccacacttctttaagcattgcaggcatgctgtcctgagtttgtgctgaacacatcaccaacttcttttccgttgctctcctgtgttgctaatggtcttgtcataatcacactggagaaccctggagcagcccagacactgcctcctctcccaccccctatgtttaatctgatgccaagtttctgatttgcataagctctacctttgcatccctctggcatccatcctcttggttctccttcagcgatcccagccctaatgtatcacgtgtccaggatggtactgtcaccgtttaacccagggggccacaaactatagcctgcaagcccaatccagcctgtttctgtacaactcttaagctaagaatggttttattttattttattttattttatttttagagacggagtctctctctgtcgcccaggctggagtgcagtggtgcgatctcacctcactgcaacctccgcctcccgggttcaagtgattcttctgcctcagcctcccaagtagctgggattacaggtgcgtgccaccatgcccggctaatttttgtatttttagtagagatggggtttcgtcatgctggccaggctggtcttgaactcctgacctcaggtgatccacctgcctcagccttccaaagtgctgggattacaagcatgaaccatcacacccagccggtttttatgtttttaaatggttggaaaaattcaaagaagaatcatcttttgtaacacgtgaaaattatatgaaattcaaatttcaatgtctctaaataaatttattgggactcagccatgttcattcattgcacattgtctatggctgccttcgtgctgcaacggcagagttgagtagctgcaacagagaccgtatggcctgaaaagcctataatatttactgtctgtctcttgacagagaaagcttgctggcccctgccctagctagaccagccactgctgacctttctctgtctcatctttcattccttttaatcttttctctggtcatcccctctttgaaatccttcaagactcacccattgcccaaaactctcaagttccttcatgatctgcccccaagctaatcatttccatttattaataggaactccttgcacttccccaagtgtgtcttgtacttccccactatggctgtcagtgtggtgctttattccaggaataacttctcttcctatcttcttaggagaaaatcttatgtctcctttaggcctcatggcaacagctgtctcctccaagaaagctaagtctcctactattgctacctcttaggaatgccctagcactctccctgtactgcttttattccttgaggttctttctgtcacagtctgactgtttcagcctaggttgtgcagtttctactaggggtgagatctgtgagggctaaggcacagatttggtgagtgcaggctgggtgtgtctacctgagcaggtgctctctgggctccatgggacactctgctttcccaggtgtgtaattcctatgaatttccaggacttttgttctcctaaacctatgtgacattgttttgaaagtgggaaacagaattcaacatttggaaattgatttttaacattaatgtgaaaagccattatcattagttgaaggtacatcacttaatctaaatctcttatctaagtatctatccatgtctatatctattgacccaacatctgtcatcttcatttatccatctatccatctgtcagtcttcatctctatctattgatccataccagtgcccacatctaaattccacagctgcagttctagcactgtcacttgattggtgatgtcccatttttatggagttactcacagatagtcctgcaacatcgtgttcctaatctcccttactgagctgcttcccatttttcccatattcctgccttatgttcctgccaaattatgtactttccttctcagggaagaaacaattcctgttttagtttgctagggctgctgtaacaaagtgccacaaactggatggcctagaacaacagaaatttattttctcggttctggaggcccgaaatccaagatcaaggtgtctggagggctgtgagccccctgaaggcactagggaaggatctgttccaggcccctcttctagctttggtagtttgctggcaattttggacatttgttggcttgtagacacattatgcagatctctgccttcatgttcacatggtgttctgtgcgtgtgtatctatctgtgttcacatttttcctttgtataaggacgtagtaatattggattagggcccatcctagtgacttcatcttaacttgaacatctgcaaagatcccgttttcaaataaggtgacaatatgaggtactgtggtgatggtgtttgaggggcacaattcaatccctaacagttccctatttgctatgctttgtctgttgctcccgccacatggaatgtctcccgctccccagcccatgcatttctgcctggtgaccatttttctcactgcctctttcccacccgcatgtgatcttatgaccactccctcactacaatccctcagctgtgggtgtatgcctctctcttgccactcaccagtgaaataccataatataatctgttttaggaccccatgactaaacttcccatgctctcttttcctttttactttctcagctcctggaagattgatatttaggtatttgcaaaattatttttaggtaagcttacagaggtatagactcccattcttggcactgggtttttagctcctctttgcagtcattgttttttactcttcttactcatcttgatattgcctctccctttatccagctctgaacatagtggccatgagcataggaggccctcaatgtgtgttggttatttggagatttggaggacagtgcaagcagggatttgatatacatttgctggtatctgctatagtgcctggcactgcaaaatgctgatgcttgggagctgtgtagtatatatcttccactctttttctaggcctttgggggaggtgatgacacctgcactgcctaaactgagtattttgtgtgtgtgtctctgtgtatgagtatgcttccatcaaattaaaaaggacccaaagaaaggtgaagaactattcttctctactgatgtacaatgggacacctttcctccgtcttcttttccccttcatcaccttcagtaacttcttcatcatcacaaatcttggaattcagagccaaaaaatcccaactcagaggtttatattatttgattttttagggccataaatttagaatgagccagctatctgatcctattagccacatcttgatcttagataatctgcttaaaattgataccaccctggaatgtggactttactgattgcatttcctgccagattctgacttttgtcttttgctcatcatatcctaaatggtacggccatgactccaagggaagttgagcaccctggggtagcagttgggacttgaagatgttggttccaggagccatatggccaagtcagggtaggaggcattgatgttaagatattttttttctttccttacctcagagttattttgaaagtaacataatcatttttaaagtccttagaaggagaaatgctttgcaagtgccaagatactgtagtgcagcctgaagataatgtggcatattgttgtacagatcacacacacacaagtcagattacatggttctgaaaaaacaagacttcaattgtctgaaatccgtatctatcacatgggaaatagagagagctgttggatttgtttcctgcccttggcatctacatatagagggggttaagaacatgggagctgagatggcaaaacctggattcaagtcctggctctgcctcccattaacagggcaacttggcatgaattactgagcatctctgccccttcatttctgcatccacaaaccagggtccataccagttctcccctcatagggatgctgagaaggtcagattagaaaatccatgcacagcactttgctcattgcctgggcaagtgaaagtgcttatagatattggttgttggtttttttttccaaatagtcttattaagaaatgaaaaataaatccatgaaccatttcattgtagtgtatgcgtctgaaacagttccaggtaagaggagaagaattatcaaacagaaatgaacaattaactgccaagtggcttatacagagagtggagtctgagctgggggtgaaaggattgaacggcaattggatgagaaaaataaattagaagataagcattcaggacagtggaatactgtggaagtgaggacagaagctgaaaggcatacagtgtggtcagagtttatgtgaacaagagagtgtgagtagggaaggagtagatgatgagaccaaatggttggctggagatagagtatgtcaatatcaggatggcagcctaagctgtttgggcatcacacagtggcactttcaagtcactggtggcttctgagtgattggtgaatggaatttttattgatatgattggacaataatacataaaatggattaacttaaggactggaagctgggaaacatgttaagaagcccccaaacagtggccctaaaatagggttgagtgatgaggaagcataagccaagatttgttcatcatctagtgtgtgccatgtgccagatactgacctgggtgcctttaaaattaaaaaaaaaaatcacaacagcatctgggagatagacaaagatatcctcagatatcctcagaaggggaaactgaggcttagggaagttaagtaatttacttaaagttactatctctcaacttttctgccatgctttgctaaagtggggatctaaattaaagaatgtgttcatgagatattccaaaacaaatcattgaaatcaggtgtttgatatggggaattagaaaggcactggcaagaaatgaagatgactccaagagtttgaacttaggtaattataagcatgatatgactttagagaattggcctgtcagaaagggaaattgtttgggatggggattgtagaaatgttgagtttgttgttatgatgcacaataatgggaatgccaagaagccagctgccattgtgagaataaaattcagaagaaagtttgtgctggagataaagggctagaagtcaccgcacaggagatggacattaatgatggagggtacagggagatggagagaggagcagacggctagagcagcatttcccacattttactctgcatagaaatcatctgaggattctgttaaaatgcagatcccaatccggtaggttttggatggagcctgagatgctgcatttctgacaaactcctggtgatcctgttgctgtcagtctgagatccaaaccttatgtagccaggggtgaaaagactgatgcttgagaaactagcatagggaccagtgaaggaagagaagccaacagaaagaaagggagcagaaaggtaggaaaatgatgaggatggtacagtactctaggtgtcatggggggtgtgggatggtcaaggtgccacattctgtggaatgaacaaggtaaaatgatcaaagagtggagaaaatctagtcatggggtaaccattggtgaccttcaagaggtcagttttgtaaaaggattagaacttggattatgggaatgtaatcatgaatgatctgcaaaacagtggaggttagggttggaattaagttatgcaaattgttggtatccaaaggaactaagaaaatgggatgaaaacaaatggtatggtaaagtgggggacattgctccatcatttactaggtaagagactgagagtgtgggcatacatttgtttggtatgtgtgcacatacccaaagatagagataaacatatatagatttctgtacaaaagggaatataacagcaaaggcagaagatgttgaagagacaggaaataattgaagaaggaagttggagataatattgaaggtatcagttaaagggttagttttggaaacaaaataaatttttctccaatatagaaaggcaaataattgggctctggtcaggatggtaccataagtttgtgctttagtttcctcctctgctccaaatatgtaacaatgacaaaaattataaaaagacatggctgggccccaaaacaagataaataatctgtgaacaagaaatggtacagaaataaaaagtgatgtgcagagttacattcattgttacgctgggttccaagtctagaatcaaaaagtcagggcaggaatttagctctggagggtatctgcagaacggtatgtgctccacattgtcagaggatcagagctagactcactgcttcaagtcttggggtggggatagtgaagaaaagagtctgaaaagataatgtggctgacccctatctgggttcctaataggaacctgtgagcctgaggaagtgggagagagacgataaagttgtagctttgagaccatgaactgacttaagccgctcaactagctgaagactgttgtactctaccctcagtattacccttgtaggaggactccaagtcattattataggatttggtttataattgaagtcccaggaagctagatggaggtaacaacaacagcagcaacaaattagacaatatgagtgagaagaaaaggaaaagggaaaaaacaaagaaaaccagaaaaaattcttttcactcaaaatgaattaaagtgaaaaatcttgaaacaagcccaggcatgatggctcacacctgtaatcccagcgctttgggaggctgaggtgggcgcatcccttgaggtcaggagttatagaccagtctggccaacatggtgaaaccacatctctactaaaaatacaaaaattagccaagtgtggtagtgtgcacctgtaatcccagctacttaagtggctgaggcatgagaatctctttttttttttcgtgtcagcactagatctatatgatttattttcttggactttttttttatactttaagttctagggtacatgtgcacaacgtgcaggtttgttacatatgtatacatgtgccatgttggtgtgctgcacccattaactcgtcatttacattaggtatatctcctaatgctattcctccccctcccccaactccacaacaggccccagtgtgtgatgttcccttcctgtgtccaagtgttctcattgttcgattcccacctatgagtgagaacatgtggtgtttggttttttgtccttgcgatagtttgctgagaatgatggtttccagcttcatccatgtccctgcaaaggaaatgaacacatcattttttatggctgcttagtattccatggtgtatatgtgctgcattttcttaatccagtctatcattgatggacatttgggttggttccaagtcttcactattgtgaatagtaacacaataaacatacgtgtgcatgtgtctttatagcagcatgatttataatcctttgggtatatacccagtaatgggatggctggatcaaatggtatctctagttctagatccttgaggaattgccacactgtcttccacaatggttgaactagtttatagtcccaccaacagtgtaaaagtattcctatttctccactgttggacccaggaggtgaaagttgcagtgagccaagattgcaccactgcactccagcctgggtgacagagccagaccctctctaaaaaaaataaaaataaaaaaaagtatgaaacacatgaaaaaaatataatgataagcatgtttgttattatgtatgacttttattcagtaatattcttgtaatgctagccacttcaataagataaaagaaataaaagaattggaaagacagattatccttattgtgaagattctgatcaccctacatagaacatcaaagggtatttataaaataatcattagaactaattagggagtccagcaaatttgctaatataggatcaataaacaaaaatcaacgtcttccctaaacaccattaaattataaattctgaatgaaaatttaaagtataactttctattttaaatcagctttttattttaaaatagctttagacatatagaagttataacagtggtaccgagcattcccttatatctctcatccagtttctcctattgtaatcattctatatcaccatgatacatttgtcacaagtaagaaatgagtgtaggtacattattcttaattaagttcaatactatactctgatttcatcagtttcccccaaatgtcctttctccattcctggaccacatccagaacaccactttacatttagttatcatgtcttcttagccttctatgatctctgacagtttcttagactttccttgtccttgattaccttgatggtcaggtttcatgtagaatatctctcaattttggctgtcagttgggatattgggaaggaagaccacagaggtgaaaggccattctcatcacttcacttaaagagtgcatgcttatcacatgacttaacactgatgatgctaaccctcattacctggctgagatggtgtttgtcagttttctccactgcaaaactacattctccctctttccgtatactttggaagtaagccaataacagtgtacactcaaggggtggggggaagtgaaactctacgtccttgagtgaggagtctctgcgtaaagtattcgtaattcttctgtaagggagatttattaaacgtagtacttttatcttatatttattattattattattattattttgagacagattctcactgtgtcacccaggctggagtgcagtgtcacgatctcggccacgtccggccctaaacgtagtacttttaaaggaaaaggtaatatcctgacattgaggaggaaaatatctcttaacatacagatttaagtaacataaagggaaaggtgaatacatttgaatacattaatttaaaaaaaaatctatgagtactgtatacaaagttaaaagacaaacagtatcttgagatgacatcatttcaatgcatatatatataacaaagaatttgcatagagaataaataacaaactcccacaaatcaagaaaagagtaactacacacacacacacacacacacatctatctatctatatatatctatgtctagatatatagatagagagagaaagacacacacaagaaaatgaggaaaggatacaaataggcagttcacagttccttaattggggaaacccttattgagatgatgtacaacctcagtagtaattagggaaatgaatcttaaaactacaaggagataacatcttccacccatcagtttgttagaaaaaatatctgatatgggaagatggggtaggaagttcatccatttagtgattatagaaatatgagttggtaatactttgggtaaacatttagcaatagaattatgttaaggattcaattacactaaatttagggatctcttccaaagatgtgcttctcaaatgtttttgtgcgtagaaatcacctgaggagcttattaaaccacagatgttgattcagcggggtctgagcatcttcatttttacccaactaccagctgatgctgatgctgcttgtccacttgcctgcactttgagtaaaaaagctctagagtagaggtcagcaaactatcactcattggccaagggccaaatctggctcttgcctatttttacaaatgaaattttactggaacactctcatttgtttatgtgttgtctgtggctgccttcagactatactggcagagtttagtggtagcagcagagactgcatggtttgcaaagcctaaaatattttctatctggtcctttataggataagtttgccaactactgctctggagaaattctcccacatgtgcatacagatatgtgtgtaataatattgatcgcaactttttttggaataatcaaaagatagaaacaagtgtcagttggcagaataggcagataatttgtagcatattcacatcatggacttcgttagctaaaattaatgaacgggagctacatgtatcaacatggataaatctagaaaatacccactttttaaaagcttaaacttacacagaacaaaactataatttggttatggatatatgcatatgcagcaaaattatttcaagattcctgaaaaggataatcagctatttcagagcagtggttacttctggtgatggggtagaggagaaacagggttatatgtgaactcacatgggttctcagccattgcagtaatggattatttgtttagaaatttgagaagaagatatcaaaatattataaattgttaatgctggaggtaggcacagagtttctacacttttctgatattttagatatttcaaacatttgaaaagagtcaaaagactcaggaaaaaatatactgaatacaaagacagatattttgaagtacaaggaaggcaatgaagatagattattaatacccgagattctctctactctcagttaagcaagaaaagaagatgctcagctattacaaattgttccttatttagtgaattctgagaatggtaaagaaattttttttccatatgactagtattgctccatggcttatgaagtattatgattctaagaggtcacttcacccatgttatggagtggaaggattttcactttctctggggactaacatttcactcctttaagccaagatcagcttatcattggaatagtcttagtgattccaagtggtgggtggccccccagcacacctcccccctttttttgagttagagccttgaaatactcatcagggacaagctgtgagagccttcaagatcccttcaggagcgagtcttttgcttttgtctgagaatctcagtggtccatgcccctttatctcagccaggcatggatgtcctccccctgtgacttcctgtgggcatgacgccatgagctaaattgtagtcggggtacattcagcctcagccccctccctctgagcatctgcacacagctggaaccagacttggcaaccgtggcatgcgggccaggacaatctcgtcactcattttcccagcagcattgaggtgactttataggaagaggcggcccatactgaagttgggggtctcagttcagtactcttagctacacagtatacaacagggacattttggttctaagtacctttcaatattgtatagaaccctttgaaatgtgtttgttattatagggatgtaggaacactttgggtccagttattcccccatgaaatgtacagctatattaaaaagtcctgcttgttggcattcaacaaccttttgtcgtgtgccttatacatgtcaggcaatgcggaagacacagccagtggatgacatgagtgccaccttctctcccagcagtagctttttccagcattatgcttcagcatggtgtcctgttgggaacctgatttctgaccatgcttgcttcccttactcacatagttcagtttctgagctgtctcccccttctgagataggtttgtccctctgctgtaggtttccagccacttctttatcattgttagccatgaccagagggagcataagtttggtattttaggggcattcaacaaggcttgcagagatgggatttcctggtcttaatgcacagcctataacctagtacaataaacataatgtttattgtacagtttgaatctcaaatgcaaagacaagccatgtaggtactgtaaataagtgcaggggtgaaggataataggaattggtggagaatatggcaagctggagaacacacactcacacacctcgtataaactgagtggctaccgcagtgggttatcactgtgcagtaattctggcccagggttgccagaactctcggactttcaagggaagctagaaatggggatattttaaatgtgagatctcccaagttttaaatgctggcaactaagcaacaaatttttaaaaagaccatttgtgttaaaaaataaaataaaaggcacatcataaggccatatacggcctgtgggttaggtttgcaatctcagagtaataaaagaaataacctgaaagtttaaagcagcatagactgtggccagcaagcctaggcgtttggggctcactcacctcggccagtgccgccatccttttattgaatccgatggcatgagaagaaagaacttagactcaaaaaagcgataactacacccaaggaaaagatacagaacaaatcaatcataaccatagcccaggcaccattagaatgctttgatgatcaccttcccacaaccttagaagggccaccatacaggcaagaaaagaagcaagagacatgtgtctatgaggaatcctttcttcaccaagattcactcgtttctgtccatgcttgtttacacagtggcctggggtgggtgctcaggaaagagttccactgggtaccatgcttggcttaccaagggtattctcagatattccacaacccttggttagggtatgactatattttaattatccatctctccatactcattactacctcacgttcatgtggtcatttttcatcctctctaggctgaactccctgaaacatcatcaaaatgaaggggtccgtgaccagacagagtttgggtttccttatctggaaggtcccagtgcatgcgaagtgtcattgtgagggtgggggtgaagccaccagggatagaattaaaccagggttggccaggggagggaatgacagggtatggtgctgcttaccttcctaactaaggaagctgttaataaggtaagaaagccctgccctctgtttagaacttgttgaagtggccagagtgagagccctgttcccccaagagaacgtccttaccatcactatcttgacctccatttcacccccttcctggatattggttttccacaaatgagatccgtattgcaaagtggttagttgcaaggactttggaggtatgaagagctggattcaaatttagactttgccacaaagtgaacttggggctgtttttccatattataaaggcacagttttctcccttgtaaagtggagttaatactatccaccttttggggatgttgaggtataaagaactaactgtaggtgatacctgtcactggcactcccttatatagatctatggattccagggctatcagcaacatgtctgatggtacgattggcatagttgggtattgctcggggctccctgctccattccatgcctacctgcaatggggttgaaaaacatctcacctcttcttacctcttgggggaaaggtgggaaagttgtggaaagtgtggcaccctgactggggtgggatgcccttcccactgcattgccttctggctccctgttagtctaccacccagggccccagcgccagcactcctgtgtatttcagcccatgctagggtacaaaatgcttttttccacagccagtgctatgtcagtgctaagggttactgtgatgtagcaacttgaagatgatgaatgaatacatttgaagaggggatgtttgaaaataattctatagaactgcatttggtattgggactgttgtctaaaccataacctaaactactttatgcagttaggtaatagtctcatctcagataacaaaaggaagaagcagagacagaaggagaaggagaggtctgtgagaatccacagtcaggtggaaagagtgtaggcagaagatgcagggaataccttctccctggaaggtgctgggctggtagctccagaatcccaaggccagagcacaggggtgaaaccccagcaagggagagagaattagaatctgcaagaatctcagaaaaacagatttgaatgtctttttatgtggcaaaaccatgggaactgacctttccttgctgcagtcaatataaaggacttgcctttagagattcaaccagctcttgactcaataggattggctccaaaacctctcatccaatcgtatgggtgctcaatgccccttctcccctaagctccatttacagtgtccctccctttcccaaaaagatcccagagcctctggcttgcttctcagggaaagtattcttagaagatccctgaagacccagctctgttctgaattacagagagcctacaggtacctttgtgctgaatgttttggggaaagctgttgacagacagaggaaaaggtcagatgtagcggggtctgtgggcccctggtgggtaaggccttctttggaaatgcctttgatttgcccctcttcagccttttcttcaccatttacccctttaccagtgtccactgtggttctgggctcccctgctcttcccccagtaaatgccttttgctttctgctcaggggttgttctgagacagagggagaggaatggaggattttggagcagtgcctcttatgctatcaggcttcagcttttagaatcttggaaagactccacctgggaaagagttccagagaaaacaaacttcagatcccggctcatatgggaaagggctcatgttcacgaaggcagcttcggggacattggcagagacttaggcgggcttggccctggtctttaatggatccgacacggatctttccagggcccacaaatgctgcatggtctccaaaggagatttcatcctcagaagctacaatgatatctctttatagaagttgtagtcttcaggtcttcagtgagctaacagcttttgtttttccaatggtttatgccctaacaatggcaaggaagattttaaggaaccaaacaccaccacctcctctcatctcctcatcatccccgccttgtcacattgctttcctcttgaaaattagctgaatttttttgatgggatattagaagccagaaagagggtcttgggtccaggattatctcccaagtcagaagaaacatccatccaggcccaggaatgacactctgaatggcaatgatgggcaccattttgagacattctggtccaagaaggaaaatggggggcaaatatgttaggaaaagtgcaggacagagttcatggtgatggtgaatctttcttctctgactctaacttgtgccatttctataatgccagggtgagattcttaggatctagattttatgcgtaaaataaaccagctgccactacaggcacagcagagtgggtacaggagctgagaaacctggatttctgtttctggcattgtgcacttaagaaaaatactttcccatgttttttgcacttggggtttaatactgaccattaattcccccatgtctgcctcttctgccaggggtcttttcaaacatagacaatcatgggatattaaacttgaaggacaatagagatcatctagtcccatcaactcactatatatatgaggaacctgaggtccagagtggggaagtgtcttacccaaggtcacatggtgagttacctcctttgacgtctttgtatgcagtaaagatccctcccctaaccaattttggttcttaagaccttaagactcatcaagcctccatatatttcgtggactgaggtacgactaggtgcccagcacgggatttggtactaaaaaaatcccttaaattaaaggagtgtcttccaggggaggaagcttcatagggcctaggtaagggctatgggagaagcaggagaggaccatggcctggaaagagacagtggtgtcacaaactttctcagcaggctacccagaccaatggccttccttcccttttccttcataccccagataacctttatctggggtcagggcagggatgctgtctcagaaatgtctcaccttgaaacagcctccctccaaacatgatgtcataggcaaggaaggtttcctctatcttcacaaatctgaccccacctccttcagaggaaggggtcccagcaccccaaatgactcaatactgttttgtccatagcatgtcctgggcaggaggacaggaaagtctcaatgcaatcaaattttgtttcaagtttttcccatcatattcccaatgtccagaggccccttatgacctctacattcctgagcatagcttccataaaaagataggcttactctgtgcacatattcacacacacatacacattcaaacacacacatatgtgtacacacacatatattcgcacatacatgcaaacacacatggaaacacatacacacatccacatgaaaacacacaggtgtacacatgcaaacacaaacatacagatgcacacaaacacacaaatacacatgcaaacacacatgcaaacagatacacacatggaaacacatgtacacatgcaaacacacacacatgcaaatgcacacacacactctttacacacacttttaaaatctgtagttgattgaacaacatctttctggaaattttattaggaactcccacttttcaggatatcctaactcagtccatggctgtatggccagaaaggaaatgagctgtcatggaagtcctccttgctcgaggcagcacgtggcctcggggccaccagtgttactcctccagggtattttcctcccctgtaagatttggaaagatggcaaggctcagagatcagccgttactctctaaaccttccacagacctgtggtgtgaggcgaaaaggtcaatgagaaagagcttgtaggcttgggagtatagcacccccacctcctggtgtggtcagaagtggtctgtgtaattttagctcctagaattagaaatgcccctctggtatccttaaagagtgtcagttctgggaaagcatagccttctcctcccatcccttagcccctaagtgaccctacagtgcataccccttctccgacacacccctcagctcatcgtcagggtctcctcctttcagaaagatgcttatagactgagacccacttagatgagacctctcctcctcttccatgacaatccaaggccaagcccccaaaggttttgctcccttcccttcctcagttcagtggaggctgcagcaaaatggagtgtttccagtttctctgaccatgcagggttttaagttaatcccctcctcctatccttcccttttgctgacagttcttcccctttcaagctccctctctatttcccctcctagttttgatcttctttgggggttttggtttttactttattttgcttttttctgtttttttttctttttgttttttataggtttcagagaaattatgttgaatccaataagccttcccggacattccaagcctcttaaccatggcatctatgttgaggatgtcaatgtttatttcagcaaaggacgtcatggcttttaaaaactccttttaagcctccttgttttgatgtcaccttggtaggctgggccctctgagaggttggaagctctaggcattgttctctttggatccagggatgctaagtagaaactgcatgagccaccagtgccccggcaccctttaacaccaccagatgggtgttttcccccatccaccactggcagggttgccccttccctccaatcatcactgtgctccttttttcccggcctacgaggcagctcctgccactatctttagagccaataaagagaattaaaaacctgtgcaccaggagcatcttttaaatacactagccattctcttgctttacaaaaacaacctaaccatcacaagaaagcctgatgaagtccagccgtgctccagcctcactttccctgcttggaagcgtggggtctccctggctctcccaggataccatgctgtcctcttagtgacctcgtcgccctgcaacctccagtggggaagagtcacagagagcacctaagcagaggtggagacggcgcggtaagaggagggggagccaggctcaagtattggcaccaagttaggtctcagaggaaagaatggaaaccaatcactttacatttttatttttattttcggtggaaaaatcatccttttttgggacatacttgccccctacttcctcttctctctggaacggctcacaatgagtgtgacattagaaaactccttgcagaggagagtttctccaggctcttcctgggcccttagatctgcagttccgacaagctttggctgcaggaggttttacccatgaactggccatcctactaggaccacaagggaccaagggaatcagggacaaaggcccttcctgccagcccatgatcccgggattggctctcttcccctacttccacttattcttgactctgagaacttttggaacccaatggaatcagcatttcaaggtcaagatgaactgaaggggaagagaagtaaaacttggcctcctccagcccctctcatggcaccaatggaagtgtcctcctgttctctggtcaatatgtgtgtttactttgcttgctttgactcatgccttactccatggccaccctctcccaaagagggggctcgcttcccccattttcaacttgatccactgaggagagggaagggggtgactttcccttcttcagtaggaaaggcacatttgtagggcctgaaactctcccgtatttgctgactcattggtggagtagacttctggctcccagctccactggcccatggggcctccattgtatgaagtcagcataggctgcccacctaatggtggagagcatgaaactgggagcatcctgtggggggcttgtgggggaaaaaggtggttgttttaacccaccgttgttttggggtggtgttgcacactagtagagaatagagtctatgcctttggcaaatttaactgggagtttggattcccacttaagggttttacttcttgggtcctgtggatggtggttcttcgtgtcaggatcccagcccgattctgcaaatgcctccatggggtttaaaaacatgaggctttccaagttcttgcccagtatctggggcagcctccagagtatcacctgggagttcaggttctctccagggctccaggtgtgtgtttatctcgccccctccagctctcctcatcctgctccccattgctccatgtcaggctgttccccattgtgccctgctgatgctttgggtccagggcctcctcccaagtgtggctttaaggagtaagcttgaggatgatgttttttaattattgtaaatcattacctcatttccagcctcccaggctccatccatcccagcatcttttattctgccattttcctcaccttgtgctatgacaatggggcgttgtgtttccacagagacttataggagtgttcagtgtatagtttcttaataaacactttattttctaatgaaatgactgaatcagacctcttatttggaaattttgcaaaaacattcaaaatacagaaattccaggttacctgcattttttcctgttttcctgttactcttttaaagaagtttcttagttaagttctttgtttacaaaggtgttcacaatctgttccattggttgctttcattgagagtcttccagatagcttaggctcatacagtaaagtgctttttcatcgtattgagaaagaattagaggctcagagaggttgaatggttcatccagggtcacacagtgtgagaggtgaaagcaagattcaaatctgacttctacagacactactcaggccactgagaccctcactcctttggtagctggggaatgttctgttgtctgagcagccaaggctcacagaaatcttctcttgagagctgatatatgggggtctgagagtggggttggggatcctttatctttggtgcaccagcaaagccagtggggctgtccctaggatggagtggttttgtatgttccctgtggatgttgggaaagtgaccttgcccaaggaaagacggggctttgggcgtacaggtcaacacacttgtcattcagagacacactccctttcatgcacacactcaggtgagccacactctcatggcaagtttcatgtgggctgccaggagggagaggccaaagagtaaaatgcttagatgaactggcacatctgtgcacccttggaccctggcagtgacacagctagaagagttgaaatgctccctgtaacttgccctcttcctttcaggaggagaggacaccgtgaggccctgtatgcaggagagatggagcaagagtggagaatgcgggccgggaaaaggctcctgggtggatctgaatgcttcactgggccccagtaatccctgatggagctcagtcattgaggcagtagagatgagacaagtaaagtaatgtggaagagctcacgttccagtctgacaggaagttgatcaggctaggttggtgcttttctatataccctcagttgctttatcttctatttaagtctagtttggtttgagacccccttatgccaaatggaagctcctgctctctagagtggcctgggtgaggggtagaccaagctcggcatttatctcttcttgagggttccaaggagaaagagttggaacagggatgcctgaagggttgaggctgtcctggggaccatgaggacatgcactggttcgagggagaactttcatttttaatataggagagatttgagctttctttttttctgatgcttggagcctatcagtgtatgggagaagagataatagataaagatggcccctgagaatatgggaaggaaaagtatccacagctcaggaggaagggatagcattggcctcatggagggagtgctcttcccatagagcaggaggcaaaaagaggaaaggatgtggaatgtcttttcaaggtgatagggcaaggaagtgagggagttcttgtctggtggcttccatttttcctataaagaatgaggcaaggccttgtgctgctagtgagaagacccaaggagagttggaacatctgaattgacggggaagagactatggacgactatggggatctatggaaaggttgctgggcagaatgaggaaccagctgcgattggagtctaggcctccgttttccatgttttactgctaggtgttgaagtctcatggcatttaccccagggttggtgcctctagggaagtcagagctggtatagggcagatgcggagagctgaactcagcccagaaagatgccagtttggactggcctcagcttagggtggctcagggaaccagccagtcctgcagctccctgacctcctgcattcgaatgtcaccaacaggatttcacagtagctttgtcagaccttaagcttacattttgatcctgcgggattttgctgcacagattgacagctgactcagttcacgaacccagggtgcttgccaggcgctccctggatcttcattctagagacttggttgacaggtgctggttctgaagctcagagaatgagaaactcaactgtaccaataagatcttgtagaaacaaggtgaaattcgatctaacacattccagggacatgccctggagaggctggacttttttactagcattacatgatgaggtcctggaactggttgccaacctcccaagaatgggtttactgtggggcattaatagtaataattctatgtaacttatgaagcacttactcagaaccagtcagattttacccacaaggaagctgaagctcagaaagattgaataactagctcaggtttccacagcttgaaactggcagaaccaggactgacagggggactgcctgacacctcaaaatgcttttggccactctgcagccccctaaagtagcacatcttctgctcctggaaggctatgattgtgaaacaccacctaggtgctcccccctccaaccccactccactcctaagacagagaagtctttcaggggtcttcagggatgagcaccatccctgacttccttctggaacttttgggacagggtgattttaaagactggaaaagaacatctgcaacgttctttcctctcattgtagcatttagtgacttgggggtgtatgaaagcatggttgggcttagatctgagattaatcacatgtcttacagttggtgagattcccaagcaatgatggcctttttgatattggggaggactcatcatacagttggatgagaccaacctgatccttaggatagcagttaggctgcccaggtctgggcaagggtgagaagcttcagataggaaggtggtagaagaaaggatgagaccaacctgatccttaggatatcaggttaggctgcccaggtctgggcaagggtgagcagcttcagacaggaaggtagtagaagaaagggccttgtctgactacccactgtcacttaacctttcttcaacgcacctcaaagacctcctgatatgtccaagctcagccatgcaatgctcaccctaaaaagaccaaacacaaatcaggctcaatttggaagtcaagaatctgacctctagccacctctgtctcttcttttgtgcgggaatccctttctgcagccaagctcccagcagccacatcctcacctccacctccccagccacaggtgtgaccgcagcacagcactgggctgtgacacatcccctggctcgtcccagttccctcaggtcaagaccaggcatgagcaaaggatcaagcatctcagatacaatggtgaggcagcaagggagggttggatgccgcgggaaagctcaggagcgggcagatcaatgcaggacgacttcattgttgtgtagctttctgcacggagccagacatggattaggcaaagagccggagcctttgttccttcagggtttactgactcctgtgctctggctagactcgcacattgctgccagcatgactctgaaagcaagagcaaaatgaaggtggcagggagggagagacagggagggggagaggggcgatgctggctgcttggagtcttctctgtgaagggcccagggaaaactcttaagcatgacagcagagacgggaggaaggtggagaacaatggggagtctggcttccatctagactgtccagcacgggcctggagctctcctcctcctctctcccagctctcccccacccaccacattgccaatctttaatgctggctgatgtgggcgaaactgcttgcagcctccagattccttggatagctctggttctgcattttgcctttagaaatcctactgttaccaccccctatacttcccacctcccaagaaaacctcagcctagatctgacagtatatttccagagctaaataagactccttcttcaaccctacttgaacccaaaagtgagttgaaggagatatgctggcaagagataagtcccttgtctgcttttttgggtggttctgaaattccatcaggattctgaggccctcttgggtaggacttttgttccagtttctcctactcagtggataaaacttgcatagagtgaccccagtttcccttgaaattaaatcttgataagggaagagatttctgcacgggtgataaggtctaacacccctctgtgtttttgccccttttcattttggcacattttccttctatcacaaaatatctgggtgtttgtgcctgagagagctagatcttctctcctcattatgcttgacttctgggtgggtgtgaatgcattgctcaaaggttctgtatgctcctgggccaggatggcgaggaatgacaaaaacgagggggacaaggaagatatcagaggcaaacctttgactggggcatgctctgctttgagagaagggaacaagaaagacaggagcacttctgaggagcacagatcccacagggacgtagaaggtactgatggctcagatttggtatcaaaggcctccagcccaggtctgtgtgggttgtatctgggaaggaacttggaactctgaggtagaggaaaacggcagggttgcaaattacccagagaactgagctgtagagaaatcttagctgagggctctggtgggactttcaaaccaagatacatgagccttccatatgggaccagatgggcacctggctttctcaggatcatggtattttctcatgaccctctaccaaaaggatcctctcaaagcttctcttaaatagatgatttaaggctttgatttacctatgggtggggactggggcctttggcgtaagtcaagaagaatggagcttggcttttctgagagccaaaaccctcgagcagttctcacttcacaccctaagagtaatgtcaagtaatgtctgagtttggaggggtggtcaaaatcccctgctcagctatggagagggtttgcagagcaaggagtgaggctgcccaaaggcatcgttccagtatggcagtccctgacttttgtcttcttccaagtttgagggacagaacatcatgtcacctcagaaaacactaccaaacctggctttggtaagtaatgctggaagcctttgtggattgcagtgatgaccagcttgtcttcatggctgtctttgcctcagtttctgccacctgtgtgctgttatcatggcagctcaatgaagcctagctctgcctttggagacctcactggagcaagtggcctatttccctgaaaaagacacattctcccctcccttgccctcaagttcattctgcagtgagaaggacaaggacttagccttggcaaaggggaaagtgacttcactgctgtctaatatggcctggtgatacctctgttacagagttctgatagaccacttactttctcactccaaagctcacactaccttcagtctgtttgggacctcgtaatgtcgtttaaaaatcacattgtggtattctttgctctgcaaggcttgcaatagcctttggtcaaaagtcatgaaatcctgaccttcaaaaacgcacttctcataaaaagagagggtgtggagctgtggggagcacatgtgctcttctagggatggggcaggtctacagagcctgtgacatggtccttggcagctgcacaggcctagggaaatatttacctctcacagctaggttcttgagcgtgtcgggagctcatgacatggagggtcctctagttttaagctgaaagggtttagcctctgtgacgcaggggacccctgcacctacaaaggctaatttccagtctttctcagcactgggtcagacaagcagtctccaagctctgccctcttgctgccaaagtcaaggcaagggtgacagaaggaacattccagagtactggctagatactaactaaatctagcctattaattatattctgtcagaatctctggatgctcttgctattaattctgaaagaaaattcacatggcagagaacatgagagtaaatctcaaacaacttctgtcaagactgctagttcctgacagctcaccctggccaggagggcacagccaggatctgtgatgctctctggttgcccccaaccggcgaccatagctcctcactgaggccttttgcttcagagggagccagatatagagctggccagggagaacttgagtctgtttcctcccactgtcagtgggcagcaggggaggcaccaccaatatagaacatattctgagaatgtccttcttgggagaatttaaattctaagttcatgtttaaatgactcacagaatcgttcaatctttatggctgtcaatttggcatttcttgctaccataacaggagattgctacacagtacctctgataccaaatggccaacctagtcgttaagaagaccagaataaccccactgtgcattttcaggatggtgtctttggccatcttaataattttattgggtcaatcacttgaccaactgttatcctgcataaattggtctgttttctgggcagagcttcagggcctgcaatatggttctcccttaatttgaaatccccaacttgcagaaaaatctttttctcttcctccagttactagacaaatgatgttgtaaggatcaagtgctcccctttttattgattgcagcaatgtttctccttagtctcatgatatgccaaggatccatcagagaactttggagaatgttgcacaatatggccagctcttagagtttcacagtttgcattaggatatcaaaggctccaagaagtcctgctgtaaacaaaccttattctacctctttccaattctaattaaacacaaaacattcttcatttaatatctattaatagactcagcacacacatgttagaaaacactgggttatagtgtgatcagaagcttttaaagaagaatcaagcaggatgtgttcgtcaaccacccacttcttatatcaagaaaccaccacacccagcacgctacccagctctaggctcagccctcacttctgccttctacgtagagtcagaaaaaattctggttgctgatggatagacactcttgtgaagatcaggaaaccttcgctgtgatatctcagaagaaaatggtaagtcatttcacataagagcttgagacctcagcattaaacctggccatccgcccaggctggtggaggtgacatcatctagtggtagcatacagcaatgaagacccggatcccagtctcaactctaccactagcaaaatgacatggggtaagttacctttccttgttccatatttgtctctgagtagctagtagagtttgctgatcctcatgtaaaagaccctgcctggacagatgccccaaataccatgtccccatgagtcactgttgtctcttagtggaggacatctcttggttcctggtccttctctctctctgaatatgttgtgtataaggcaaactgagtgagagagatggctgcccctttgggtgaggatcagtggatttctctggatgagggtggaagcagatgcttgggggttaatagaccctctctgtcacagctggacaaggccaagcgggagttctcggcaagattttctgaaattgatctcaagaaggcagctctgcctaacaaatagtctgaaatgtcaaagtataaatgttaaagcttgaggggtcattctccagggagttgcctgggctggctagggagggagaggaggagggagagagggacacagcagaatccttcacataaagattctgacttggttttgtgatatttaagaaaaaagaaaactctgaattatttatagcacagaagatgtaagcaggctgtagagaagtagcctggcttcacatgatagtttatggccattatttagctgccccagccttgaactggtaaaacttttctcattagtcacatgctgttgagctctacttgagctatctatctatctattcttcttattattgctattatcattattttaatcaagaaaattcatgtccttcaatatatgagttgggggacgcaatttctggaaatgatatttgcacaaagcaggagttacctctttcccttaaagggactctggcacacgcgtcagtaactctttccacccctgtgggtgtttccagcctgtgcctcttcaagcagggattcggaaggcccctgctctgatatgagtgggaagcatctccgtttgggcctgggcaccaattggccatgtcaatctgggaaggtgaatttcatctctcattcgttccctctgaaagatgaaggcaattgtcctatgcctcttctgagtatgctgggcataggaaggataattccattgtgttcaaaataccttggtacctggcagggggtggggggatagcatctatgttatgtgaggagataaaagaagtaaagaaatgttaaaaggttaaataaaaactgattgaaggattggtggtaaagctggggggaatgagttctttcatctgtttattttggtcagtgataaaatgaatgcttcatgttgataatcatatcctgattctatagcatgggtaattgaaattcaccaataatccccaaattgcagttagaatcacaagcttcacatgctctctcttccatctctacacatggtacaaacacgctcttagtcactctcctaattgtttttgcatacccttgacaatactctgggagatgcaaacacatggagtcaacttttggtcagtttaggggtggtgaggtgaggttagtcaaactgcaaattagatcatcagtagagctccaaacaagcaatattgtatttaggaggtgttgcttttgttgaagatatcaatactttcgtttctttcctagacctgtttttttttctaccttgaagaacctggagaacattttgcagttaaaatgtcacagtgacactcctgttataaaactctgaacgtgtacatatttttaccctcactaacttactctacctcccagaagtctttgaagtgttttgcctccactccctacttgctgtgatgtagaagttaggctagcaccattgctctagggcagtggttctcaaagtttttggtcttgggacttcttttcacttaaaagtcatagaaaccccaaatgatgtttgtttctgtgggttatatccatcatattcactgcatttgaaattaaaactgagtataatttaaaagctcaagtatacacacacattccatgtagctgtcaggatgatgacatcatcacatgtctggaaaccactggacaacttcatgaataatacctgcgagacacgagagtaaaaaaggcatacactatcttactattgctgggaaaatagttttgacacatgaatctcctgaaagggtcttgagcccaccagggacctttggaccattttgagacctgctgttctaggaaaacaggcacaagcagattctgaaatcaaacctgagtccctttggagccagggaaatctaccagtcatgcactttgatccaagtgtagaagtccatcagaattccatttctttactcagacatcactgactgccccatgggtgttgacttaaagcaaactggctacaaccatgcatgttcagttgctaggaatgtggaaaatatacaagaaagacttcacctattataagaaaacagagtgggggctgtttgcttgctctggagaagaacatgggcttgatgtcacagtaaacattattggttgattgaagagactcagcacgaacaggatttacaaaatcccattggtgagagcaggaggcatgaatggcatgggatgagagaatttataagcagcaccttgctggttgggcatcccttcattgcactgtagctctcattgtgcatcacatttggacttgtttaaggaacatgtgaggctcgcagtgctctagccaggacctatgggagtgcctatttaagtttagacactctggcacctccttcctctttctcctaagctgggcagcttcggtataggaagattggactatgaaatgctttaatgtctagggagcttccttaggttaactctgtatagcacccagcacaccacccagcagagggacctgtctcatcatgaggtcctaagtgggtgacagtgttcatgcctcttcctgttcatcatttataccccggggagcaagaactgcccttctgtgggattatttcacaaacccaccggaatagggtctttcaaggaatacctctgagatcatgagcaaatgttgcttaattgactcattcttcaaacatatttggggcatccactctgtgccacacactctgctactaagtgagtcagttgtatttcctgtcatcaagagctttattgtctcctgcactggttttcaattgggggtgatcttgtcccctaagggacatgtgtggagacatttttggttgtgacaactgagggtgggtgcttctgacagctccccacaagaaagaatgatccagccccaaatgctaacagtattaacgttgagaaaccccagtctagagacaatacagtccagtattcactagtcttgggtaagaggggacctccccactttttagggccctcctttagctgccaaaagtcctagggccatgagaagggaccatctggagcctgcaccccacctcccttctagacaatgtttcatttcctaaaccagaattccttacccaaacagctctcagcttgcctccaggacacatgcgggtctcttcattcatctgttctaagggtgggctacgctgcaggtacgtgtactgctaagcccaagagttggccaaaggattactgtgtgggggcagtgggaacatcgagagtgtcagggtgggacggttagaggaagatggagttgcaggctcagtgtgcacacatatgtacgcgagacccctttcactgtgggatggaagatgggggtggaagagaagggaacaggccaggggccaactccttagcaccatgtgtctccactcgcaaatctgaggaaccagagacaccggaagtcacctggtccttcaggtcatcctgaagatcaatttcgcagggcaggaggataagacatgccttatttattagtgtgttagcttgatttataacttccaaattttagacatgtgtgtgtgcttctaattattcccttgtcccaagtccttcaaatgtaaggaataggcctggtatagataagtgagtaattatgaagcaatatgatgaaattatgggagaggtaaacatagaggaaagacacctagttcccaagtggagttttttgtttgtttgtttgtttgtttgtttgtttgtttgagacagttttgctctatcatccaggctggaatgcagtggtgtgatctcggctcactgcaacttccacctcctgggcttaagtgattctcaagcctcagcctcccgagtagctgggattacaggtgcccgccaccacacctggcagatttttgtatttttagtagagatggggtttcaccacgttggccaggctggtctcaaactcctgatctcaagtgatccacctgcctcggcctcccaaagtgctgggattacacacatgagccaccttgctcagcctaatggagttcttaaaaatactgaatcatgatattgatctgcagatgtttaaataaaaatggcagttcaaagaatggcataatcaaaatgatcagttaagactttaaagtttccattgtttagagagagctgccttcaagccttggaaatcctgactccactgcctggtgaataaacaccacggtcctttggtgacctcgggctgcctgaggtacacaattgtggaggttcttcctgctggacagtctccacactggggcaatgctcttacaggcccacccagttgccatagagactgatctcgaggtctccacaattgactggtatttactggggatctgcagctttctggatgccgtgaccagcatcataaaggaaagagaggggctgccccttcccggctccccatctgtggactattgtgagaatatctctctgtcacagaaaggtaaagaccctggagaaattgaataggaaggatagtttttttcttttaataacattgtgcttttttctgattacaaaggtaatttatattcacagtagaaaattcagtgaaatacagaaaagcacacaaacacataaattatccaccatcccatcacccagagacaacactgttaacatttcagctttctgccttctaatcttttttatgtacttatttgtcagaatcaaatcattccacgtgcacatgcacatacacattactttgctacctttttttaaaaataagattgcatttgcaatttaactgatcttttgcaatgttaaaaatttttgtggaagtgatatattcaccacatggttaaaaaaatacacacatatacacacacacaaacttgcacagaaatgttcatagcagcatttttcataatggtcaagagcagaaaaacgcaatgtttattgactggtgaatggagaaagaaaatgtggtgtaaccatagaatggattactactcagcaataaaaaggaatgaagcacttacacatgctacaacatgaatgaatctcagagaaacatgctaagtagctggacacaaaacatcccattttctatgatgccatttgtgtgcaatgtcaagaagaggcaaatacggagagacagaaattatattagtggctgcctaaggctggggttggaagcagggattaactataaatggacccagggttcttgttggggtgatgaatgtttgaaaactggtttatgctggtgattataccattcagtagatttactaaaagttgttgaattttacattaaaataggtgaattttatggtatgtaaaataatgtctcaataaagtttgtatatatatacaaaataagttatataataaatatgtaaaataaagtttgcatgtatgaactcaatgatgcttgtatataatacatagtaaatatataatatataaactaaacatatataatatatgtaaactttattgaagtattatcattatttatccaaattactgctacagattgatctatctgtctataaaatgagagcactccccttttttacacctgttcctcattggcaagttgttcctagcaccgctaccattaccagataagtaacctctgttattgagtgtccttatgaattatatctaagccaattatatacaaacagatataaatgtatgttgtttattttttctctattttgtacaactgcagctgtgtcatacatactattgtgcactttttaggataatcccttccccaccccagtttcttggagctcttagagaactccctcattgttgttttagagatccatactatcctgttatattgatgtactcaaatttatttaatttcttcacaacagtttgctcttataaaacacggaaatggattgatcctaaatatattgaaactaaataaatgtggttgaacctaaatataatattaacataaagccgtatgacccctataagctatttggtatatctgttttgtatatattggccatatggggtgataccaatgtgtaccccaagagtaatacagatgctcctcaatttaccatgaggctatgtcctgataaacccatgataagttgaaaatatcacaggttgaaaatgcacttaataacacctaacttaccaaccatcatcgcttagactagcctaccttaaatgtgctcagaacactgacattagcctacagttgggcaaaatcatgtaacacaaagcttactttataataaagtactgaatatctcatgtaatttatggaataccatactgaaagtgaaaagcagaataatttcacaccatagtgaaattgaaaagtcccaagtcgaaccatcgttcagtgggggactgtccatatatgagaatgagattccccacagtcttaataaacagagggtcatggcttgacttttaatgactgtgtcatgctccactgtgtggacataccagatttatttgtctagtcccctgtgtttgaaaacttggattgttttatttttccattcttacgaaaaacagcacaagtatttaggtactcttggtggttaagctgaacaagggagatggctcagtggcagccctcatcagagatagtatgtctgtcactgcattgctacctctgatgaggactgcaggtatccagtggattcccccaagcaggtatccagtggattctcctgagggacagctatcttgtaacagagagctgactgtggaaagctatctccttctgaaacattattgcttcagacccaaagatgcaacacgttgaatgcagaggtcattatcttttttcaggtaacatcaagatgttgccaacattcacataatgttgttccccaaagggctcttctggccagagccttgccacattttagggctggggattctgagctgcacagtccagaaatgttaatggaattctgaatgaagcctctaatctctatgtcctgcagagggttaaccaagcgtgatgccatgactttctcaaggtcagagtgagggttgggaggtagtacccatgtatcctgacctcttgctctgacctttaagcaggcggcgtccttggaacacatcgggtggggcatggcagtagagattgaagctggctgtaaaaggccacagacaattcagagagaggcatttccagccaacccactgatctgggctccaggcaagggaggggcacaaactggagagaagtcaaccagctggaaggaattcaaggaaatagcaacaggaaatctgaaggggtggagagattgctagtgagattatctaaatctgcagcttttgaggccaagtgatagccatgttttctctctagcagccctcagcggtgacagcaaagcccatgctgtggcttcaacacctctcctcctctttttctaacaaacagggtctttagtgtctttctaggggtgagcatggatggggccaaagatggtcaggcaggagaaatatatcctcttcctctcctcttctgggttcctgagctcttgtctgctgaagataagtcctgggggaaggaaaggtctttagacagcagagcagatgatgcagaaagagcccaaacatatgcacgggcaagacaagcataaagtgatgatattagggatcaagatccaatggcaacagggaagggagaaaaaagctgggtgtgggaggagcattgtagttgaaaccaataagtgcaattaggtttgtgtcacttcctacagcccaagcaagctgtttgttggtcatctgttagaggtggctgccaagatgccatgtgcattccaagatccctgggtgctggcccttcctatctgccaggccgagagagggacaatggatgccagctctggaagtccactcagccatgtgtggcccacctctctggtatgctcctggaagcaggggtagttggaatcaaggaaatacagcatcagaaagaagtctgagcacctgctcattgctttccttgcaatggggttgagaagaagcagttataggtggattgaatcaggggttaatggctaggccaaagggaagcctggtgctctcaccaacacaccaatgtccatctgttgcttagcccatctgggcatgccctgggcaggacctgctgcagctcagaaagcaggagcttttaggggacagactgcaccctcaggaattggccttgccactgcagcccacttcagacctgacttacttcctgcctgattaactttcccatctcccaccccagctcctgctgtagctggtatgccaatcggcaaacctgctaatactacagtgcccagaaaagtgggtgctcaaaaaatatttgttcatttaagaaagttattagctaaggcatcaattaaatgcgactttaaaaaatctccctagaaggagtgtctccagattctttggaaatctacccacatagctagcttgagttttttagggatcggtggcatatgttcttcttttaatgacagtcaacagtttaatgatagtctctaaacttaatgccaagtgtaggctatgcatcaggtttacatggtggattcaaacctggtctgtgattcagagggagatggctgtgcacagggaagtcatataccacattgtgataagtacccatatgccctgggcttcctggaatttcagaatcctgatcatacctatgtctgtcgagataagtgagtaccccatctcatcagatgcaaggctgctaatgatcagagaggccaggtaggcattagtcagactgtgaaggatttaaacttcacctgtgttgaatgaggactaggaaaaagcagttgggcctgggcatcagagatcactgtgactttataacaggtaaagtcaggggggtgaagtggtagaagtgagagtgaaatgaggcttgagaaatgattgggaagcagaagaatgatatggcacgccgcttagactacccatcagagtctggtgatgaaggcagacaaaggagtaatttctaggggaggacgggtcaaggaaatactttgattaggatgggggaggccaggcatagtgtctcacacctgaaatcccagcacttttggaggccaaggcaggcagattctttgaggccgggagttcaagaccagcctggccaacatggcaaaacaccatctccactaaaaatataaaaattagccaggtgtagtggcacacacccatgatctcagctactagggaggctgaggcaggagaatcccttgaacctgggaggcagaggttgctgtgagccgagatggcaccactgcactccagcctgggtgagagagcgaaactctgcctcaaaaaaaaaaaggatggggggaagctttattctgtaggtgagaagtcagtgggcaagaggggtttatagtagtgaagagagacgggtgctagatgggtccacatccaaaaagtagatggaaaaaaaaggagataaaagcttgagtggaagctttacaaccttagaagaaagagaagagttattaattcatgtaagatgaaaaataaacatgaggtaagtagaattgaagacagagggaaataagggaatttcttcctatttccctagctcatctgagagttagtccatttatactgggagatttgtgctctggtccctttgacaggaggtcctggattagtcttgttcgaggagggacccaaacaaggtactgatgaacagatagtctttcatgaaggaggcagagcacttcctattttcaccattatgagttttggctgaactcaactgctctacacacttaattttggctgtcatagctaaatttggggtctgctccccacttcttttttagtaggatgcagctggggaaaggcagcaggcaacctccttcatctccagtttcccacatgtctgagaattcaacttggtggccatgccaagatatgctggctccatgcaaggatgccttgggacagtgtcccagagactgacggagcttccacatttggctccctcttagccgttcccatgaagagagtcacagagcctacaaaactgccacatatttgagggctttccagtagattccgtggcccttttgtgttggtgtcaatcctttaatgagttaatgctgtgatggagctctagcttgagcgtagggcctcagattgaggagcagctgggatgttccatgaagatcgagacccgagcttctgattttcaataactttaaacgtttaggtatttgctggtagaatctatgcttagatggctgtcgtcttaagctcgatatgaactcagagctgtgattgatgtcctgttgggcactgccctgatttaataactagcacgcctgccttggtttcagaattcggatctgctgaagctgcagccatctcagttggtgctggatctccagctctcgcttgatgtttccagagagtcacaggagcctgtggagtaatgacaataaaacccagaaaggcagccgctcatctatttaacgaatacttattgagcaccactgtctaccaggtggtggcggaggtgctgggtacagcactgatggagacgcaaggagccagagctctgcccactaggggaccagatgataaacaaacaaataagtcaggaagataattatccgacggcggcagttcgagccatgagaactgaaacagtgtgctaggctagaagtgactcctttccactgagtggttggagagcaagcgttcacagacaggtagtggctgctgtcatggctctaaggtggccctgagcttggaatgtttcagaagagaaggaagggcattgggtagagtggagagggaatgcggggggcggggagcgggggtgggggcagtgaagatgtgctcagagggctaggcagaatcaatttccgtaagcaatgatagagtgcattgggctgttactcttaacttgggtttgaagcaggggaggaacatcaaggttcctactttacagttttttaaagatgacttgggttagccgaccatgtcccagagttggggtgagggatggaagagaggggtgggagaagaatggaagctcagtttgggagacccctgcccaggtgagagagcctcgtggcttgagctaggatggtgccagcaggataaggggcagagggtctattgcagatgtggacagatttgagaattgcttgggtgttgagtggacacgatttattgatgggcttgggagcactgcaggaaagagtcatcaaggaaaactcctgggctaggggcttgagccgttgagtgaatgggaatgctgcttaccacatagggacgccctggggaaggtcagattcaaggagaagaagcaagagttcttttcggctgtgttacacgtgaaagaccactagacacacaagcagagatgccaagtaggggtttggacaacgatgctggatttcacaagtcagatgatatctgagcatccttcagatgaaatcactggagctccaccctgaatagacattccgtcctaaggatgctcagagttgaggtgggctgaagttatcttactcttctcctgaaatcatcagagttctcgcttttgttgaggtgggtcaatacagacagactaagcatcctatatatgccactgcccttctgaatcttcatcctgtatgtgaaacacgccttttatgcagtattttatgcccctgaaatcactaatttgtggaattgtgtgtggagcggcttttgctgtaattttagcattacgtgggaagtttatgatgaatcaacacgaactcccatataatacatggtagacatttctgctctaaaagacctccagccaccccaccaacaggccacccccaagcttataggctcccttttgttctctcctaagtcacctgagttcctctcctcggaggaattcagccactacactctaaggtccagagcaatttagttctttcctttcccaggttgagcctacttttgaatttacacagactaattaatgtgctctgctaaacaatgggccaccgacttcaggtgtaacttccagcagcacaaagaactggtagaagcttaaaatgattcagtcctctttcatagtctctgagaagcagaggcagcagtaaaaagacttatttctcacttctgtgaagtctgtcaccccaccttacagaagtgactacagttggattcacagtgcacatttgtttcctctgtgttaacgtaattatagtgtagccactctattttccaagagctcctttttttccctatgcactgtgccaaatgatttccatataggatcttatgcaatcctaccacaacactgtgctataggacatcttatgagtccattttgcagatgaggagattgaggctcaaagaggttatacagccaggggcagtggaacctgggtgggagtccagcccaatctcttaatgaagccacacaatgtcccacagggatgtagtgtgtagatgctcccgctgtgggactgtaggcgtcataataatgtacttcttggtgataattatatgaagacaattgccatggtgatgatagctgagacttgatgcttacctaataggtattttttctaagtgttttacacatgctaacacatttgtatgcaaaacaattgtatgaggcaggctctagtattattataccattttacagctaaggaaactgaggaccagaaatgttaggtaacttttctaagatctcagagtgaaatgattggtgtaggctggatttgatcccagacagtctggctccatgggtcacgttgagtggggttggctggagctaagaggattgggtgaggaggcaatacaacccactgctccgcccccagtgcagagatgtcttagtcacggccctgagaattgataaacgataaccagaacaaggtgggcttttctggacagtgtttccctaaatgactaccccacccctgccctaaaaaacagagcagcgtggctcacacctgtaatcccagcactttgggaggctgaggcgggtggatcacctgaggtcaggagttccagaccagcctggccaacatggcgaaaccccatctctactaaaaaatacaaaaattagccaggcatgttggtgggcgcctgtagtcccaactattctggaggctgaagcggggagaattgcttgaacccaggaggcgggggttgttgtgagccaagattgcaccactgcactccagcctgggcagcacagcaagactccatctcaaaaaaagaaaaaaggccgggcattgtggctcacgcctgtaatcctagcacttcgggaggcttaggcgggtggatcacctgaggtcaggagtttgagaccagcctggccaacatggcaaaaccccgtctctactaaaaatacaaacattagctgagcgtggtggcacgtgcctgtaatctcagctactcaggaggctgaggcaggagaaacgcttgaacctgggaggcaaaggttcagtgagccgagattgtgccattgcattccagcctgggtgacagagtgactctgtctcaaacaacaacaacaacaaaaaccagaacagcccactttgtacgtacctggagtaacttgcagtatgttatttgggcacttttaaatttttatggctattgttggaagatgaaaaatcagtttccatctgactgttgcttgcaagtcatttttccatatattctcccatttatacacaaagaaatggaggcccagggagagtaggtagtctatcctgacccctccagatctagatacacacaccttcccagtaccccagggtcctctccttgtcccaccacggggcttattacaatgtattcaaatttcctgggtgactcatctatcctcttctctataccgatgagctccaggaggacgagaagagtctcttattccctgctggagaccctagcccagttcctgacacacactataaagtttaatgcatatttgttgaatatgaaaaggattgaaccaacatgtgacccctcagcaaataagtgggagagccctggttggcaccttggtttccatcaccgtcaacaacgatctcctttgttgaactggcctcttttctgcccagtaccactaggcagggggctggaatggggccaatggtcgtgcctgttggcaagtttggagcaagggttactcagaggcgttggtgtaggtgaacatttccagctctcttcatcctcttctcagttaagacccaagcacagagctactaactcgctgcagtcccattcaacccctcgtagggttctctatgccaatgtgaacggcactcagcaaggtcactctgtgtgccttccacctgctgtgagtttatcatttgttgtcggctgccctccaggttccctgagccatgccgtgtccccaaatctcctgaccctctgtagcgtgcagcagataacaaacagcctctgtaagctgagcaaaggccccagttaaacacctatggcctagggcagtcagagttctctatagctcaaagtggcaggcagaacttctgcagacaaattcctgcttcaggtgggcaggtggagtaggtgtgttattaaaggagggaggacctttgaatttatactcgtctctgtgtccacgggcacaaggcagctcaaactgagcagcctcgggtaacagagcagaaatgaatcttatttttagcatgcactccatgcctgatactatgctaagggatttacagatgaatattaactcatttgcttacaaatgttagcagtagatcacacttcccaaatgcaatgtcatgtcagagaggttgagtaagatgtctggtgtcacatagctagttagtagcagagctgggaatgcccagtctcatagttcacactcctccttaccacactcctgggaaatctatggccaaagaattgtgctacttgtgcatgagaaatgaaaggacttactaaaaaagacagacgctgtggctgtcagggaatttatgggtgcacttatagatgattttatttattgatctgtttatttttagcatccactagatgaaaacagtgtagacagcacagcaggtgaaaagatgacatggtttttcacacatgttaaattagtaaccatgggcactgaacagcaaattccatttcccaaaccctggccagctagaaacttttctgggggaagtctcttcaatgaaacatttatcaagtggttttgctctgttgcagataatatttttttttcctatgactggtcttccatccaaatatttaattccttcctgattttataacttggatttcctaactcattctgcctaagtcatgacctggagtaatcggagattcatatatgtttgctccaaaatctcacagataaggggaaattatacaggagaatatccatgtgtaattgacacaaaacacatctgcaggaggcaggaggtatagctgtctggtcattcagcctccatactttttgtactgaaagtgggaaaatgagtaagtacttagagaggagacatagagggaaagggctagtttctagggtaaagagctggtgtgggaaacatctcatctcacatatatcccctagttggaatttgtaggactgtacaaagagagcccaagggctggcctctcggagagctggcaggagagggatggcaacccaggccgtgggccttgcctgaaccctgcacagtggaggctcaaggagtcattcacatctgcccacagagcctacaataaagatctatttcagagaaaaaaagcatacacacacacacacacacacacacacacacacacacacacacacacacactgaaaaggtctggcaggagcagagcagctgcagaaggcagcaaagaacaggctggcaatggaggtcgataacccgcacggaggaggggcagatgggcaagggggctagaaagaactcgttcccagggaaagcagagaaagtggagtggtctattcccaaggaggccacagcctgcagacaatgtgtagatgtcaccatatgaagcagcaatctcttctgaaaaagcagagaggaaatgtccgccaggctgataagaaaggggagttggggtccttctgcagagcatagaaggatggctccttttggggctcctgagtgtgtttgatgtgggttcctgaggctgatgccccagagacctcaccttggttcttctggggccacccaaagaggtccaggcctatcaataagaggtggccattcattagctgcacaggtctagtgatattcagtgaagatttctcccttctctattttccactgaccgtcagtcccagaaaccacttgacctccaatgtctgggatcttcccagagactagtaagaacaaataacattgacatcattgaaacctcacacttctctatgtgactcagtttctgtcagtaccaggaaaacgataaagaatcgtcttctggtccaaagcaccatccatgtaagtgtttgctgatgactttagctagtgcccgagaggcagcaaactcggagcttggtgaacacacatggacctgatccaagacccccaagccaggggagggattccaggggtcagataggggcgcttgtaattccaccagttctttttctttggttttcttttgttgttttctatagaattgtagggtgggagaggttcaggagacaggccagaaaaccaccggccagtgcgtttaacatctggtgtgggggaaactcttggaagtcagctcagaggatgtggtgggaaaacacctggcagagtgagtgggcttcgacagggggaagcatggatccaggatcgcggaggccttgcggaacgaatctgctggctgcgctgagctgtggctgcccacgcggagggccggcgtggctgggactcgcaggccctggcctccgaccttgttccccatcagatacagggtgagggccagagcgagaggcttagagggggcggcgggggtagggcaggaaaggcgggggtgcctggcagaagccctggctccgggagtgggagtggggaatgggaacatataccttgaaaggggcccagcgtgacctctcgggactcccggacagtctcctcagtctgcggagggtgggcttcagagacttccaaaagagtctgatggaaacggtgtccaaatgcagaggtcacgcggaaggagatggtgccgggaataatggagtgcgcacagggtgagccggcggccaagataactttgtgtcaccaagggctccagaggaagcctgtgggagctgggctgagttacggagggacggggagctgtctgtccccggggcagggagaggaggtgggggttcgcagagaggctgatcaccagcgctccactgcacacctgagggaagacaggaagccccaatggggcaaccagagcagcccaacagagcttccctgctgtgcaagggcaagagccctttcatggggggcacgtgtgtgtcctaggagctcacgactagactggattttaagcacgttaggaagaagaggaaagaggagtctttcttttctttctttctttccttccttcttttctttctctttctttctttttcttttcttttctttctcttttcttttcttctttctttctttcctttcttctttctttctccttcttttctttcttctttctttctccttcttttcttttcttttctttcttttgaaatggaatcttgctctgttgcccagcctggagtgcggtggcgccatctcggctgactgcaacctctgcctcccaagttcaagcgattctcccacctcagcttcccgagtagctaggattacaggtgcgtgccatcacgcctggctaatttttgtttttttagtggaaacttgctttcactatattggccaggctggtctcaaactcctgacctcaggtgatctatctgcctcagcctcccaaagtgctgggattacaggtgtgagccaccacacccggccaagtctttcttgaagaaagacccttagggttaaggaccccacatggggattctagtttctacatttccgtggacttcgggcctgccttccatttccttcagaagcagggcatcaccttctctctggtgtctgagccttctgctttaagcaagagtaaagttaggcttttccacagaaaggcctcccaagtctctgtggaaggactcactgggtgacctgttcatttcctagggtcctttgtgcattaactaaaatcctttccatcagtaagttcattgctgggggaaagaatgagggtaagcagacttcttcaggccagcaagcttttcttctggaacctggtgaatgtaggaagtctaagggctcggcccatgtccacaaatgaactggaattttatgccttagtataactaaatcctatcacataaaaattgaatgctggtctttgccaacaccacttactctctctagtcaggcagcaaggttgttttgaactggtttcctctgagctgcccaggaggtgagcttatgtagggggcaacaaaataagcagagatggtcctaggacacctatttttgcataaggaatagacattctgaggagagaaagagaagatcaggaaatgatcttacggataacacaggattatttcccgtgttggggattgggttgatttctactagtggaagtggggacgggtaccccagatggaggaaagctaggacacagatgcacagcacgagctcacatggttgctcagaggacagtggatggccagcctgtccatctgttggatctatttaatgcatttatgaggataaagcctggggatttgggccaggttatcagaattctcaaatatcagactaaaaactgtcctgaagacatggatactctatgttaaggcctattgagcacctactgtgtgcctcccaactgttttaaacacttaatctcttcatttaaagatatcaaaactccatgcagtaagcactttaataataaccgtaacaataataagggagaatccttgcaggtttgagcagagagcaggtgagaggaagaaattggcatattccttcccgaacttttatgggcattagctccttcgacacgctccaaatgtacgactgtacacatgatttcactgaatcctcatggcaagtcaatgaggtggatattttcttaatttcgctcatgaaaacaacatttgagactggtttagtaaattgccaaatgcggcctctgaggatgtgtccttgagtgtgaatttatacccagttctgtctcattccaaagccatgttctttctcagtccccttactctgatcctggtgtttgctcccaaggtccccttcctgtcctttcttcttttcttcgtgtctgttgtattttggggggtgctgctgcctctcttttatagaccaaatgatgctctttctccttattctgcctgaagcagctcagttttatcttggacccatggttgtaggtagctgtcaaggtcaatggtgtgtcctgcaaatgggtgactgggatcctctggtctccccttctacggttcaccctgtggtcctcacaggtgtttctcttcctgacctcaagactttcagcatggagctgcatctcatggctccagtgccctgcaacctatgtcttggcccagaattctggtgctggaagggacagcctttagcacattgtgctctgcgtgttctggtgagaacatgacatcacagggacggcttgggggacagagccagatgccaggaatgagaggccaaggcagcattcctgggtagtagctggaaaggaagggcctctggggagattgagaggtgggatgtgaccctcatatgggcactttgaagagggtttgtcactgtcaggccagaagaggcagaggaaggagggggcccagcaagttgtcagagggacacattctcagtcggagcctgagattcatctttcagcacctaacttcacaattccagatggctctccttggggagttctttttctctttattcttggctcaagcagtcactgcttaatgagagccagaggcactcttgccacgggaaaggccaacagaatatagagaccaggaagtgggtatgaaagggcaggcgtactgtggtagggaggctgatgttgggagcctgggtgttggttggtgtctgagctcatggcggtggagcatggtggggtagcactggggagcagggacacttctgaacttcagcctcagcttctgaacttcttgtgtcaggaaatgtgaactggaaattgccccagaacagacagtcctctgctgatcctctctcttcactgcttccagaaacagcagggtgtcttatttatatgttcatcttggtgggaacacagtgtctcggtgtcctagactgctacctctagcctaagggtgcacacgtgccccagagtgggacctgctgtttgctgagcttcttcagagctgaccacggaggcactttgtttagaagtctggggagccggagactgagggttaggatgtgggtctcagtactttcctggttcaatacgatcttggttcctcgggccattctcggagccaggacataaataagtctgttcttaggaacttcctggctcttttcccattctcactcatctttcctttctttttgccactcccccagattcccttcttcctccctctttgcagtgttttccctgctaaagtctctagcagtgcttcagggggagttttaatttatttgcccattcatcatatagttagtgggtacctacttggtctcaggccctgtgctaggcccagcctacgaacttgagcaacacatgccttttgacttttggccttttgacttgtgcaactgccagcacccttcaaagcctctttgtaaaaatgtcaaactctgaaaagaatgtgtgagggaagccctaatccagagaaggcctagggacgaggcatggactggccagcagaaagatccaggttcttattcttaggtaaaaaatcctgagccaacctggtcccagggcagcaacaggaacaatcagggctggtggtcattcaacctggaatccattcccaagtcattgttaccccatttgactaatcatttttattttttattttatttatttatttttgagacagagtcttgctctgtcgcccaggctggagtgcagtggcgcaatatcagctcaccacaatctccgcctcccaggttcaagcgattctcctgcttcagcctcccaagtagctgggattataagcacatggcactgagtgcggataatttttgtatttttagcagagatggggtttcgccatgttggccaggctggtcttgaactcctgacctcaagtgatccacccacctcggcctcccaaagtgctgggattacaggcgtgagccaccgcacctggccttgattactaatttttaaattctagacctctaaaaaaattctgcagagtttttgtcttagatctccagccttcaaaatgtcttctcttagaaaggtcctttacaggaaaccaggagatcctcttttttctcctagtctataaatcatccagggatggctctgcaggagtggtggtttgaatagtttagccatgctctactcttctgtccaggtggagaactgactgggttggctggagacccctacaaagggcctgtagctggccagggcacatgtttgtctggctatgctcttatgcaataccttatgcaattagctcctcttgcttgccattcatagaaggcgtgaggtgagacccagccaggaggccaggagaaagtgtgagggcagttctttgagggctggcagaaatttatatcttgagcccaggcagggccctgccctcttggtggtctccttccccctcaaaggttcaaagctggccctctttctccctcctgccacttcaaacacccagagttggagctcccagaatgttattcttttccatttaaagacattccatttcatgtgtaattaaatatgtggtattgaattaatgttttcttctgagcctttttggcagccagagaccctagggtctggttagtgcagagaaaacacacgcttctcacagatcctcccttcctctccctgttttctcttcccccttctctcctgccaagaatctccctcctccctcctccctcctgcgtgtagtcacgctcaggactcaccttgtaatgggtgagcctgaggtcctggaaactctgtttctgggtggggcagcaaggtcttgggtttctgcattctggtgctggctttatcttcaaatgtcatcctggtggctcacattgagcttaggtggtggcaatcaagggtaggaagaataggttccaggataaagtgacacactctctctttacagatgttattggtttctaccaagtactgatgccagtgcagaaagcagagcctctctctgaagtaggggttgcaggggttgaagggggctgtcatgattaaaggatgtcaaggtggcacagtctgctcagcccagcctttagagtcccacaggacacctctaacagctaggggatcttgggcaagttacgtaaccacctggagcttcagccccctcatctgtagcacggggacagcaacatattgtgtttaagagacttgtagggccgggcacggtggctgatgcctgtaatcctagcactttgggaggctgaggcaggtgaattacctgaggtcgggagtttgagaccagcctggccaacatggtgaaatgccatctctactaaaagtacaaaaattcaccaggtgtggtggcacgcacctgaaatcccagatactcgggagtctgaggcagaattgcttgaacttgtgtggcggaggttgcagtgagcccagattgcgccattgcactccagcctgggcgatagagcgagattccatctcaaaaaaaaaaaaaaaaaaaaaaaaagaacccacgaaagacagagctgtaaaggtatcatgtgctcagcctggtatctggctcaggataagtgctcaattgatggcagttatttttattattaataagggcacagagggataacaacgagctaaaggagcagtgcagagcgagatggaatccacaagggaaagatctgtgaggtctcagtgatgaggacaggaactagttaggaactgagtatcaacatgagccagggaagaggggagggcaggatggttaggagctgccaccaggggccagccctcagggctgctggtggtggcaggggactgcttctgagcctcttaagtcaacaccttcagagaaggactgtctcagtcctgtccacacacgtggtccccaagacaataattagccaaagcaccgaggtagcaaacaagtttcttttaaggcaatctgagtgtgactgagtgcacacactcacctttggggaccgaatttgctgcttggcatacagcaggataactgttatttataaccaccgaccctgggaaatcgggtttctctctactgatcaatgccaatcttgagttggtggctgtctctgccttttgatgtctttattccactgtctgaccaacctcctcccgcaaactgttttggcctctgaaggaggaggaggtcaggcatggtggtggcagccgtagacagagctggtgacctctgagccagggccagcttactcctgggcaagctcgtgccattttattttaggagaaaatcatcatccttctccacatttcttttcaagccacgattttatttgcaagataggtattgagctcctagttgaaatgaaaattggaaaggaaagaaaaacatctgttaaatgtctaatatattttagatattttatatcatctttattatctaaaaattttaaatcatcctctgaacagttctgccaagtcaacatccatgttcccattctacagataaggaactagaggtgtggagaggataggattcaattagtaagtaagagggtcaggatttcaatagagatctgttttttttttttttttttttttttttcccagtcttcactctttcagcagtgccatttggggcagattttttgttccctcttcctccctggtcgcagggctgagcagtttatgcctgccacctccctgccctcattctcccagaacagggaggtgaagctgacagtggtcacctctgtgtccagcgatgtcagtgtatccagcggctctgtgtatacctcccctcctgccccacagggcagccaaggggaacagaggtaggatgagggataacccctgcctgcccactgacctctcagggctctgagattttctgtccagaggtgaccagttacctcaatggattagagattctgctctaggtcacgcttgctgcaggctggaagacctcccagaagtgaatcccacacatatggaatagttatcttggtccccactacagagaaagaattcttggagcagccactaaaacacagaaatcttgtttctgttcttgtgtcagatgaaccggttgtcctgtgggaacaagaagatctacaggtggcttcctctggtggaacccagttggtggctgtctcacaaaaaggaattagggaaaagccaggccagaaggtcccaggaactcttttaattttccaaagaacccttcccattacatagcagcctcctgctttctccagcagccccttttttgttggagattgggaggtcttcccacggcctggggtattcatccccctccctgcctccccttccagtgtctccatgtctgagccttgtgacccagactctgctgggccagccagccaggcagtaaaaggagattgatgccctctcctcttaggaaaatccatcactttttggcctgtagttcagatagcttcaccagaggcagctctgaacagcactgtgtgagctaaaagcatgcagaagcagggacccaaatagacgcgtggacgtcagaagtgaaacggctcactccagtcattccccagggcctgagcagaggctcttcctcccgcactctgtccccagatacactcttctccccagggctttgtctgttctgtaaggcttccagcgggggctcctgccctcgcccttgggaagatgctgtcatagaattccaggatgagcagagtgagggaaagttgagtagtggaagatggagggttaagcctctgtgaactggatcattttagtggccgtaaagctgggaagacagagcgaaggcagcctaaggtaaaggaaagaacacgggtttcggagtcataaacaagagagtccttctttggcctcattttacctctgtgaatttggcaagttaccccctgcctctgttttctcacctgtgaaaggggtgtaataacacttatctctcagtctctcaggattatgatgagaatcaagtgttgaacacacagtaggtgttgaatacatagcgtgcaagttaattccctttgccctactgtttcctcggtaagttcagtgaaagaagctgctcatatggtattctggagtctccagtcttgttgatgcatggggttgtccacatggaagtgatttgccttatgtgtttggcccaaatccagccagtctctgccaaagctccctggttaccttgtggagcttcttatcctcatgatgaggaaccagtcctttcctggaggagaatttatggtcgaataaaatctgtgcttatttcccattcctccttcagctccttcccagcactcaccaccctacccagggctaaggacaggtattggtgtcagaattctttcaccctgaagacaacaagaatgagccaaggctattttcttctgagcacctgagtatttccacattctggaaaaagttccatttgcacatttggggaagacactttggcccacggaggcttctgcttgggctttttcatgtgctcacagagagcagatgagcttccagtaatatggtcacttgccctctgctaccttcaaggctcacagctgtcacagcttccccactcctgcaaccaggggtttgcagctgctgccaggctcttctgggatgttgagggagggctgagaaaccactccctggatgctgctcccacttggcttgtctgaatctctcaggggttgtgattcttgctgccgagggaaggagaggagaaggatggattccaagatgtgaccgaggcacagcagctgaaaaacagagtctggttctctttaaagttcctccattcccattttgcactaattgtagctgggagtgagtgttctgagtggagctggtgaggtctcccagcccagagttgtacttagggacccaggaaaatctatattgttttgccttttgtagagatgtttctagaacataagaaggcaagagaggcatgatctgcactgcatggatgggtagttgggcctctgagaagggacttgactcaatctaggccacacagctaaggagggaaggaggacctttgagctaagcccaggacgtctcaccttctcctgggcttctggaagtgaggcatggctaaactgtttgtgagcatggtacttgtttaggccaagttgtaaaggtaaacttcttcagctggctaatttcccaccccaccaaagaagccgtgttctggtgattctcaaagtgtggttcctgcaccagcagcacctgggaacttagaaatgcatattttcaggcctcaacctggacctactagattggaatccctggtggaggagcccagcaatctgttgtaacaagccgtctaggtgattttgacgcattctcaagttctcctattacaatgcagaggaaaggtgggattggggtggagtctggggccaaacggtgctcttccccaagtaacttggcaaccctgccatgtcctgatgctctgaatcccatgcccagctcagtcaccaggtgcggatgcctgatttggccctcatttctcctttttgtaaaataatatcaataataatgaaaatgccaaaacacagcctacattttggaggacttaaaggtttacaaacttccatgctcaggtaataggtaagttaaactcgtactattctccccatacccattttacaggtgagaaatctgagacccaagatttcatggttgttgtttttctgtgaggtgcataagctcttggaggatccaggtcttgaagcaagcacctgtggcttcccaggccttcccaatcccggcgtgttcagagatgtgggcttgacattgtacagctgccatcgtgagccctgtcttcactcccaggccgtgccaggacactcaccttgcagaacctatgtgtcatccctagtcacctgggaatgattaggtagcaggagcaggtggcctcccgagagagggcctgacttcctattttctcgcagtgggagactctttagccttgccctccaaggtcaacaaataccattcctcagaggctgagaaacagagacagaaagtgtgaagaagggaaccagttttaatcccctccctgtaaagactggggcatagccctgcagtgtgtagcagccgcattgcagcctgtggcttgggaggagcggtcgtcagcagctgttaacgtgcaggtctgtcctagggggaggagaaaataatagtctgtaaatgcttcctctcgcaaatccttactaggcagatcatctgcgacactgtggggataccaaggactctgaagggaggaaaaagattcctgtagtttattcttaaaggaatccccaaaccaaaaaaacactaccccaaggcttccagccatgcccctctgtccctattacgtctcctcatttatggggatggtctgccatggcccaggatctgcagctttcatttctcgacaaagtcgcttgggataatccactttttggctcagcaatgctcttcaaaatgtgaatacaggtatttaatgggcttctgcctgttgaacaattaatgtaaaggtcagtgagtaatctcctgtttgctcttttcatcgccagcccactgcttgtacaactccttcgtagcattctttccaaataggtgggagggctgaggtcacagctctgctttctccaggcacacagaccttaattaggttgctaaattagcagaggcaggggcaacccttctctctgcacacaccctcgttcttggatggacagtgaactttccttttgtgatctcattggtctttctctctttcagagaagggttggccaagtaggggtttcccccagataatcttagctacccgttagtagtctctgtcatgaaccaggcactgtgatggggtcactacagcctttatgttaccacaaaaaccaatgtgtctttgtgtgtgtgtgtgtgtgtgtgtgtatgtgtatgtgtgtgtgcatgcgtgtgtcttgtcttctacgtctttactttgtcctcatcactgggccaagctctttatatggattatctcatttaatcttcacaagaattcagcaaggaagttgttcttgttaatcccattttacagatgaggaagttgaggctctggagctaaataactttcccaagctcaaaaaactagtaatggcgtggacccaggattccaacctgattctcaatcgtaccctggaaaatttgcttttcaaagtatgaccaacagcagagggacatgacctgggagtttgttagaaatgtagattctcagacccactggattagaatcttcattttgacaagattcccaggggattcatgtgcacaaaactgtggagactgctttgtgctatctccaacaactctggctaatgaataccagaatcctgtgcattaactactaactccatttgccagcagaggatgttgtggtttagaggggttaggagttgttcagggacagcattgagatttgattctggcccatactctcaaaccacagagggatgtcagtttttatgctaaagctggtgtgctagagtttgcctttgcctgctgtaggctcagaaccaagttctccacgctagacctctgtactcttctgtctccctgtgtcaccaaacgaggactgatttgctgccctcctctttgtccccatcctacagatgtgcagcacattaagaggagagacatcgtgctgaagcgagaactgggtgagggagcctttggaaaggtcttcctggccgagtgctacaacctcagcccgaccaaggacaagatgcttgtggctgtgaaggtaaaccccagaggcatgccggcaccaggaggagggctggctgagggcccagggagggaaggaagaggctccctccatttgagaagatagtgctcaattggctttctcagatgcaatcaaaggactttgctccgaggtcaatgaagtttcctagggaccaaaacaacttcctttggcttccaaggtcaagggctgcagcacttaagggggctatgccaggggagcaagtttattcttgtaaatgaccctggtccttttttagtggccctgtggttacctctgtcccaggcctggccctccacactccacccttcaccatgtagtggctttacaggacgtgctgtctgtgcctggaaagtcacatggccatttctcagtagctgagctgttgtagagcaggctgattaaggaggactgggtaaccacttcccaagggcacagaagtcactgagaatagatgttgagggaggggggtgcagcagggaggtagggggttagcactgggagaatagtgagtgaggttggagaaattcttaggtacttcccatgggtttcaggttcagaccccaaggggcagcatgcctgggagaaacttcctcctggcagctgctgaagggctcccttaaccacagggcttctgtattgccaagacacgtggcagatttgcagcaggagctgaattgcttggggtaggagagaagggactttgctactactagttgtccttccagactcttccacccagcagtcaacagcttctctttgtaaaccaatattggacaaatttttgaacatggttaacataaaaagagtcaagtagcctcatggaggcacgcacagatctctggagcccttctctggagtctggagtggcttcattgggtgcagtgagcaggcttctgaggccagtgtagagcctgcaatgtcctgagatgtgggctgaccgatgccagagatatggctccccgtgaagacattcacccagacctcacaatggtcccatccttagcattgagggatcacaaatgcagttcctgtttcttcaacttttgggtctctgtattcatagtcttgtgtatctacagattgtttctgtccacagagggcaaatagcctcgaagaatgaaggcaatacagtgcaggcatagcatgggcatcaaagagcctgggtgcaaatcccagttctaccactgataagctttgggacatttcacaaaacactcaacttctttgggcctcaatttccttatctgtataatagcaataataatatcctctccttagaatgttggggattaaattacataatgtgtctaaaattcttaatgcacttcttagggctttttattgagtaaagactcaataaaaagtagttggcatttgtttctatcattatcattgtcattgatgttgatattactgaatgtgcttagatacatgacatatgatctgccaagcttgcaatgactatctagaataggagtcaccaaactttttctctaaaggtaaatattttagactttgagggccttataactctccattgcaactcttcctgtgttgttggaaagcagcataacaatacattcactaatgagggcgggtattttccaataactttttttattaccaaaataagcatagtttgctgacctctgctctagaaaataaacaagagtcctgcatcctaaaaggctaatgattattattgctgtacatcctgtaaataaacttgctcagtgtgcctgcatagacatgagatggtcagatggacaagggtgtctttaaacagcttggagcagggatgtagaaaggtttctaatgttgaccctaaacttaggatctgcactgccctggcatttttaatatataggatgacactaatccacggggtgttccggcatccatctggggactggagaatgaactgaacatttttgcactttcagcagagaatgaaatgatggctgaaaaccctaggaaatgtttccccgagtggtctggcattaaggggcagtacccagaccgagtaatgcagaaaatgtgtttctgtttccatccttttaaaaggatttccttctttccttggatctggaggagatgaaccgtctgggattttacacgtgtcactcagtggatctgcctagtggtcagcctggaaaagatgcctatctcctccagacaacgtcttggaagtggtgtttcctgcttcctcccctccttagattccacttctttttgcaagacccttccttttgagttagttctcatgttgatgcagagtaattttatacctctaaagaacacatacaagtataacccacaataaagttttcccaaatcaattggcaaaaatgttttgcccagcagttgctatggtacaaacaaagaagcagaaaccacagcctatttttaaggtgcttacagcctgctggggagagggagcaggattgcacaggacataatctgcacatatgtgtagtataagtgtgacattaaaataacctcatgtgtgcgactcttaaataagtggtgccactctgaaatcatcattagacaaatagaacatttacacagcattcaaacccagtcaacccccttcctttgcagaggagggaatgagatccttctccccatttttcctttttttttttcgtctctgtcatttcatactctgtcccgggtgaacctcagtggtcttctgattcatgaattcttcatgtggttttatctggtctaaagcttttcctgtctgtggaggtttttgctttcacttcaaagaccatatcttttatttccaagatatctaatcggttcttaattttgttaccttaattttatttctcccccttcttgtggcatgccttcttgttttctttagaaaatgtatttcttcactccttttgagcatttacttatttaaaaatctttttgagccattctaataaaattgatttatcttcaggaaatttatgtcctgatttttgataatattagtcatttggatttagcattatatttcttcctgcccagcacccctgggcagcttttgggttccttttggcttgaagggtgttttggtttttgttttgagtagtcacaatttctagtttcaattactttaaattgaagcaggagcttaaaacatttgtgaaacaatctgagtgcagaatctcggatttttactattttcccaatgtttttatgctttttccttccactcttaacagtatttttaaccactgacctttagcaggttttttaaaagcattcatcctagcttccataaaaactctccaatctacattcatatttcattggtttctagaacatttcattacattaagtaattacattagcaggtttagttgtcatgaatgagtttgggaacaatcactgatgactcttggtaagcccctctgtgggaaagtagtatctccctgggtatccaacttgcagggagtgttcaggatctcatgttctgtagaggtcataaggagtgccagctaatctgggctgtcatgtagacacagctcagtggagagttttctggcaaaaggaggagcaaaggccctggggcagagaaaatcttggagagtacggaaaggccatgagactgaagtgtaataaatgaggcaggaggagtgtgtgcgaggacaggacgcaaagagagatggggagaccagaccttatagagtccatgactatgttaaggagtttggattttatactacaaacactgggaagccaatggccagttttaagccaggaagacagataagagaggggcacccctgtatgtaataactacccatcttctttcctggtaaagttgtgtgagactctcacccagaggaagtggcagtggattttgagtcactaaaagaaagatgattttataatgaaaggaggttgataggtgtgcgtgtgtgcgtgcgtgtgtgtgttttaccacttaggactttgaacatttaggaatgtgtgtatatcatgtgtatatcataaaaatgaatttcaggatattaatgaaatctgaaactgaacattctttgaaatatctccccctaaaaaaaaaaaaaaagaaagtaagatggagggcagcagggtttggatgacatgaagatgctgaatgacccaggaagagttgggagctgtcgagaagttgtgttcttgccatctagcctattttccttccatccaaataaacagccttactgaaccctctccccaaggcagagtggacatgacagctgatgcacgtagaggggaagataagaaagggaaatgtccccaaactttggaagaaagagagggagagaagaagggcaaattctagctctcctttttgtactaaagatactatacaaacgcctgagccaggagcctccccagcttcagagacctcttggcaagatgcatgtctctacactgatagttggtaactatgataaatcggttctttcccatgccactgactggtgacccattttgaggtttcccagacatgaagatgttaaatgtggaccccacggagaggggccagagagtcaccggccctattttcctcctcattattctcctcctgtcacctctgttctaattgcatcagtccctggggacagggccactggcagctcccaaccctagttgccataccctacgtttggccaattaggtaagaacttcaggtttgactcaagagctggaaagcccactttgaaagcacagagaagggatgtagaagactgaaagtaatggtggttgctttgtgcccatctcccaaatgaagaacccatctctgcctcacagtgcagggtgccagcctgggggatgcttgctggtgctgctcaagagctgagaacagaaatatcccagggctgtcattgacgtccagactgtgggagagaatgatttaaagagatggagagaggccatttggctggccccaaatttgacctacttttccctctcataaatccagcattcacataaatctttgtattctcccatcccacccatgctgggttcagttttttccccttcttcttcttcttctgcatgaaaataaataaaccactctgcatcattcaatacccatgacccagcccatacagctcaaggctgctgctgggagctgggtccccagaagagactgtctttcaccatgactctctgacttctcaaatgtctttgttctggctataggtagacattacatcctattcgtttattgttaggtagcttcccagagcaagcagccagatttgaagtggagaacacatagaatgaggtctggtaaaaatcaacattgggctgatcacatgtccttgccctatcctcaagcctggcacctttgctgggctcagccactctgttggcagccaacatcccacccctttcctgaccctctcttctatacttccatgtccttttattcctctgcccaccattgtcttggggacctgcctagtgactaatttatcccataaattaattcaggcaggtgtgctgggcaggaaagtgtcctgggctccagactcaagctgttacttgttacgtgatctttggcaagttacttccccatcctgaaccccagttatctcatctgtaaaatgggaaagttacactagataactttcgacttttttgtcagccgtagattaatttaatcaagcagtatttttatgaagcctccaaattttaaaaagaatagaaggtggtgctggttgaagttgaagggggcttgatctctggctggaagaccacacctccacttgatgaccttagaggcattgctactgaactttggggcactgtgaggcccaccaggagagtactgaggtccagtcaaactctaagtgtctgtcatttaattagtgtgaatgtgagctgattcctggacaggctcagcctcagtttctccaactccagaaatgagcaggtaggagtagatgatgtctagggcccttttcatactaaaagtccatcatttctggtgtgtgctaagggctgagaggtttgatggacccccccagatacacctcttttggcatattcacactactgcagttctagaaccaaggaagccctacagatttcagataatggggctgcagggacaggagaaagatctctggtgagggagacattttggcacttgcatgatctataggagaggtcagtcatcctgaaaaagccagatgcctagcagagagaatgcaaaccaatctctagtctgtctagattgtcactcccctgaaaatggtgagccaatattacactcacttcctcattaccttgtgttgtgtctattgagattgctaaagtgtgtcagttgaaacaactcaatgttgggccccatttgccttctggcctcatagggagggtggagaggctggagaaatcggggcgcccacctgcataagctgctcctcatgcagaaagggcctctcctcttcacagaccattttccatctggccagcattgctgggcccatggcagtgccctaaccaaggtccttcagatgtgctcaaaggcttcatctttggccttgtagtccccttctggtgctgggaaatccacatgcacaacttacactctacctgggtatattcatcttcctgggccctacaggaagtggcctggtttgcacctctttctcacacttgagttttcaccctgacagaggctgaatggtggcattctggtggcccccagatgctcctttccatcctgcactaggactttgaaggactctgcctggccctgagtgtatctgagatttctgtccactaactgccattcccgtagctgccgccccactcttcccaccctattgcttcctccaaacccctattgggagaacacaggtgtcttccagaggtcaaagtgctcactctcctctgcaaatgtagataccttcacaatctaaaagcaaggactccaaaagacaaggatattttattgtgttgcctgcccagtttccaataggctatgagcatgtgactaattcacaaagctaaagtattggggcagtggttttcacactgtttattccagctgtgggacagtttcctcaaagaaaaccttaggagcaggggcttttgccaggctttcctcctcacagcccctccagctgccatgtacactcacctgcggaagcccagggctctgtgaagaacagagcttgaaatcactggagagtgcacgggatgtggatgtcagaaagtgggtttctatttctgcagggatgaaaatgctggagaaggaaggagtcaggccttatagttgagattgagcttcattgtctttaaattccatttagattcatatttattggtaacccagtggtgtgtggggccagtttctttccaggagtagaaaagacagccccctgccctgtagttgttaaacacctgtgtcctgcattgttcctaggccctgaaggatcccaccctggctgcccggaaggatttccagagggaggccgagctgctcaccaacctgcagcatgagcacattgtcaagttctatggagtgtgcggcgatggggaccccctcatcatggtctttgaatacatgaagcatggagacctgaataagttcctcaggtaagcaaggattgtcttcccctgcacctgaccccagtcccaccgaacccttggggttttccctggagccagaaattatactaccccctctaaacactttcctctcaggatgagaaattagatgaacacattcattcttatacatgatctccttagcagccagattcaggcctttgtccccggtttgtagggaaaacaagttgaggatactatgataagtatcctatactattcttcctcattccaaaatggacagggtctggaataggtccagaaggagtctggaagccccacagcctgtggcttacaactccaagattctagggccacccttctctgatgttgcaaatagctttctccctttgtgccttaagtttctcacttgcaaagtgaggctagtatcttacacccctcctggaaaccttcctgctagagactttttgatgatgagtaagaaggtccaaggttacaattcatcaggtggcagagatggttgaaacaaaaaggggaccgattttcttcaggctaattctagaactgtacagtacagtgtccacctatggccacttaaatttagatttacattaattaaagttcaataaggtttaaaaattcagtcgcactagttccttggttgcagtagccatatttcaactacttgttagtcacatgtggctagtttttaccatacagggaagcacagtataaatgtttccatcaatagaaagttctattggatagtactattctaaaaagaaaggatttgttgtaagaagggtttctccgagcctagaacaagaccatctggacttcgagggctcttaatgtaactggtaagagactggaacgccagccagaagttctggatgaagtttcaagggtggctttcccttcccaagagaagacagcatctattgcagagttaggactcctctgccttctgcagatgccacttccaaacagtgcccagatgtggaagggacagccatgtgaaggtctttggaacccaaggccccaggaagcaggttaaacacacaggccctgtatacttagggtgtggcctctgcgaccaccacaatttgaatctcattgaactctgtggctgaggataagatttccaaagttcaaatgtaaattatagaaggctctagcccactcaccaaaaactgctaagcatcctcttgaagtgggacattcaatagggtgtcgtggttttgaggggcaaagaaatgagttagtaccaggcaatggaatggaggactctctggagctctgcttatgagtcaggtttctataaagatggccctaaaggaaatgaaagcatctgtgggatgttctaagccttctaaacctggattcacaatgaaatggattcctttcctggagaactttgtctttagcataagacagatttgggttcatatcttggatttgtcacatcttagttgcaaattggagcaagttattaaatcttaattttctctcctagaaaacacgactattaataactgcttcacggggttgttgctatgagtattaaatgactatatgtataatgcttagacaagttttgcaagtagttcagtgatcagccaatggtagctgctattgaagttattactattactattttgtgagaattgtgaaccatggtagcttctaatctaggcaacactctttctcaatattcgggatagccctcactttgtccttttgttcccctggggcccaaagggcatgccctacttttcaccacatcctatccttacattcagcagtatctccagccccaagagccaccagcagggttaaagaaagctcctaggtgcctctgcactactgtcatacatgataaaagggaagagaaagaagatagtaggagggaaataaagagtgagagcctagagtaaagataaggagtggaagaagcagaaagtaagaagaaaagaaaaaggagtacagaagaaacagaaagaagtgtataaggtgaggggcagtgccagtgccttgccttctccatggcagacagcatggggaatgcatgcctgtgagtacagttctacaaggacttgctgacactctgaagacctctgtgtctctatgggatcccttcctgaagacagcatgggggagtctctctaaatcaaggctcgacagtcttcctggggcaattttgcagcaaaatctgaactttagcctccactactgaccagattcccagtaggttccattaatctgtcttcctaggctctatcagtcgagggtgaccttctaaagaattctctgagaccagaagctcttagcaacaggccgcaccaacccttcctgggaggcatcctgtcggctgttctcacaaacacagcctccataacccgcaggccaaccctgcctgctctcacatctccatattggtggtgttgagaggcaggctggagtgcactctccaggcagacagaagggagggcttctctgctgacccctcttccttgtgagctgatgcagccttcctccttctgaggagtgaggtaggcagagcccaccggagatagtaaaagggatgtgctcctacttaatggtgcttttcagaggaaatcagagaagcagtaaagcaggcagaggccttgctgtacaccagggctccttggtccacaacttcataaataagggccctgggtgtggttacggctcactgggctttctagagaaaagagtgaatgctaaaagtgactgatatgatcaggcaaggtgttagaataacaaatccgggcttgatttgggatggaatgggttctgggggtaccccagacccatgcttcaaggtcagaggctctctccactgtgcactgctatggccataagttacccagtgctaagcggtgtggtggagtggttaggagtgtcccagggccactgagcgtggactgccagcatcagccctgggagctagtgggagatgcaaatgagcaagctcacctagccaatcagaatcctagggggcagggccagggaatcttggaacaagcactcccaatgttccttttagaagctcactttttacagtcacatgtctggtttcagatcctacttcctgatttcccatatggccattctggacctctgggactttggctgagcaatctcatcattttgtgcctcaatttctttatttcaaaattggggtgggaaaattgagtgaattacaatatttaaaacaatcagagcatatagtaagggctatggcagagttatttgttgttttgctaattattctataatagacatctagcacctgtgaaaatcctaggaagcagtgaaatattaaaaagagtaggtttattccctcttccatttgagtatgtctgctctcatcttagccagaatctggttgtggagtttcacccttacccacacgtacataatctaatttggggcagataaaaataagccataggcaggatggaaagggaaattttatttatttctgtggggcattccagagggcagggacccaggaaggcctttctccttgatctcctgatttctctctgccccctctcttctccccatgctcttgcagggcccatgggccagatgcaatgatccttgtggatggacagccacgccaggccaagggtgagctggggctctcccaaatgctccacattgccagtcagatcgcctcgggtatggtgtacctggcctcccagcactttgtgcaccgagacctggccaccaggaactgcctggttggagcgaatctgctagtgaagattggggacttcggcatgtccagagatgtctacagcacggattattacagggtaaagtgactttcccagctgcaggactcagccacagagctagcgccttgcttacatgtctttttcattgtccattaaccctgtcactctggcacacacatatacacacccatgcccagacatgcactcaacagttatcttttggcctctcttgcatcttgacatacctgtttattatgttctcaattgcccactccttctttcttcttggacatttaactgaactgtaatctgtacattgcaataacatatgcattgtgttcttacgtgcttcaatactcattcttcatgtaaacatactcatacatgtatatgtatgtgcccaaacacacacacagacacacccaacttgatactacatttaatgtctccctacccagtcccagatctagcctcacccatgacacattttattctctgaaattatcttgtgattatgtaagaattatcttgtttccaaaagtagatcttgatgagaagaggaaacctaagtaaagtaacaaagatggctaatatattgctgagcattatccaaatgggctggaacagatgaggaaaggaagcatgttatctgttgccaactttggagagaggacaggttagatcttagaaaagctttctgattgtgagaagatccatcctgctcagttttaccttcatatagtcatctgctttacattaacaagagtcttattttgctcctagaatctttttttttccctaagtctttgggaatctttttttccatggattattgactgattctgatagtgttattatttccagggaaaggatgaatggccatgagtgtcacttatctcagcaaggggaagtatgagtgcaacctgagacacagagataacttctgcaaactgagtgagggcagattgctaaaaaatacagaagatccaaggctgggagtggtggctcatgcctgtaatcccagcactttgggaggctgaggtggatggatcacgaggtcaggagttcaagatcagcctagccaacatgctgaaaccctgtctgtactaaaaaatacaaaaattagctgggtgtggtggcatgtgcctgtagtcccagctactcgggaggttgaagcaggagaatttcttgaacctgggaggtggagattgcagtgagccaagatcacaccactgcactccagcctgggcgacagagcgagactctgtcaaaaaaaaccaaaaaaacaaaaaaacaaaaaatctatttttgggacatcaaaggaaagaggagtttggatagacattataaggagagtgtgggacaatgttttggaggtcaagggatgtcatattccttttcagctgttataacaaataccgcagatgggataggttacaaaaaactgaagtttatttctcatggttctggaggatgggaattccaagatcaaggtgcaaacaaattaattgtctggtaaaggtctgcttcctcatttatagatggccatctgcttgctgtgtcttctccatatggcagaagggttaacagatctctctggcatctcttccatatgaatgcattgccctcataacctagtaacttcccaaaggcctcacgtcctaacaccattaccttggggctgtttcaacatatgaatttggggggtacacaaacattcagtgtattgccaggatcatggcagccaattgtctcatctttggagaaatgagtgatcataccgtgagtcaaatagatatgattgtcctgttgacctgagcatagtggaccagaggctgggaatttgaggtgtgtgcaggtcagttctatcttgatgttcctgatggcctaaatgagatcactcagacgttaaaacagatcagtcaagatacttcattttagcaataggttggagaaaaatggaatgtttgagaaatgaccttggttgttagaaaatgacttgtttgttgtgcaaccaaagaatggcagatgatgtaccgttgtgagagaatataagacaaagcatacagtgtccacagcaagctgggtagcctcactagccacctgtcctatccagtattcccaggtatggaaaaggagacatgatgtggcagtagtcatagaccgatggccagggcagacctgccagaaaatatcaaagaggagtctttctttagtgtctagaccatattttttattcatttccaagagaggcattggtgtggttactaagagggggatgggtcatagatttcttagagtggggctggagctggcatcatttaattgcctttccactttgtttaatggggtttgctggtctgtctgactgtgctcagatctatgtaggtgttgatgaaaacaagggatggctcattgtttttctctgtgaaaggcagatgtttgattatgccaagctgataactactgacttcactggagtctcaggaaactatgtctgaccagaatgtgctaactggcccttcaaacttgcttctagatgtgctgttaatatttattgaaactagtttaaaagaggaaaaacaaaaaataaaaagatcacatccccaattgatatttctttgtccttgccttaataactgtgaactgttgctctttatgcctaaaagggctacaaggaatacatctatctaatttctgtaggtgccagggtagattagaatttaaggaagggagagtgaggtgggaaaatgtacacactacaggtaacctcaattccttcttcatgagttctaagggcgatgttagccaaggccagctagctcgaaatgtatgtttttggtcccaaggaagtttgaacaaaaaaggataactcttacagtaaatacacagcacaccattggaaatctgtgtattctactgatgagacatttaaagaccagcttgtggcatatcttcatgttcacttactcacagtgtcctaatgtatacaccactcctcattccctacttttctgtaaaatgaaaggcagaagtagatttgcctgaagtcacatcaaaatgaaccctgaagtcttattatccatattggaagacattggaatgacaatggaattcttggatttaggcctaatcttacctgtgttcacatcctaatgtgcaaccaccattagcaaccatgtaacctgaatgcattttcctctaacctctgttcaatttttctattgttaaagtgagaacaaaaatattcactcaacagagttgtgttgatgttaagcaagttaatttgtataaagagcttgtagtacaatacttactggataaactcctgtttatattatcttactagtccccctcacatccaagccaagacaactctgtggataattttatttccatatgcaattcctgggacagagagagggactccgtgaccactagaagataaactggatcatgcagctgctccaaaggagtagaatctttacattgaccacctcaggaaaatgtctttcttaaggtttcaacatgtatggaaatactgctcatgaatcctagagctaagtccacatttgggtgatttgtgtaaaacttttttgttcagtatacatcggctaaggccttggaggaatgctctgatttgtcagatcgcgagaatactgtgaaggattctctctatgagctgatacccccggacaggtttgtacctctctgctatcactgattactgaactcatttgggcctaagagtttgttggcttcttatgcctaacaccactaagtgcagataatccaggcctgtgtgtgtgtgtgtgtgtgtgtgtgtgcatacacgtgtgcttgcctgcccagtgcagattccagaatgtgcatataagggcatggggagagatggagataaactcctccttatagtctttctttttcatttttaatttgttaaaacgaagaggcaccatctggctcatacataagtggtatacagacgatttacaaaggtgaactgcctaatttcctgttacacatttagagagagaaaacaaatgttcccacaccagaacaccagagcgatttgttctctcttcttaagacattcacaatgacaaacaccttttccttctgtgaatcactgactcaatgcttccaagattacctttacactggctttgacaagggtaggctttgggtaccattatatctttctaagaacatcagagaacactaagagattgatagtcaaatctagtattaaagttttgaatgtcctgaaggggagaaggttgagatttcagaatacagatgttttcagatgttttgatttggggagaggagtcaatacactgagatcagggaggaatggaatgaggggggaatgggatcctactaatgtagagctccaggagtgttcctttctgttcatcctgctgtcctgtgtgcctgtgtgctgtcctgtgtgacagtacctggcacttgttaggcacctaataaaagtatgaatgagtgaagtcagaaagggaatttagaattaggaaataggtcattccagaccaagagaaacctagacagataaccagatgctcacttaggggaggtgagcctttggagatgatgtggaatgcagctgcaggcagcaggagcaagtcttatctaatcaagcagtgcattatcctgggagaatgttcagaagaggcaaacgagtgatagtctgagtcaaggatgacccacttcaggttctggtaggagacagaacagagtgtctaggacatgatggggtaagtatgctaaaatcctgtgtgtttatgacacacaggtgtgggtcataaacaggtctggcagcaggtagtaaggcactggattctaagctggagattctgggtcagggttcccagaaactcctagaaagacagtaacagtaatccttaggaagtgggaatcatttagaacaagccaaccttactggaagaatatttgattttatggatgtcttggtgtccccatagcagatgaaaagttgtaagctcttggacccacactgccttggtttgatctctgctcctataattcctgactgtatgaccttcggcaagttacttgccctttctgtgtcttcaactgtaaaatggagccaacatcccctatcacacgcattttctgtaaggactaagagttaagaaatataaagctcttaggatgataaataataaatattaattattgtcttagtctgttctgtgttgctacaacagaataccacagaatgggtaatttattaaagaaagagatttatttcttatggttctggaggctaggcagttcaagatcgaggggcctcatctggtgagggccttcttgctgtgtcataacatggcagaagacatcacatggcaaaagaccaagaatgggccaaacttgcttttatagtaaacccgctcttgtgataacaaacccactctcatgataacaacattaatccattcatgagagcagagctctcatgattaatcacctgttagaggtctcacctctcaacactgttgcattggggttaagttttcaacagaggatctttggaggacactttcaaaccctagcaattattggagctaaaatatgaatgctttctccaattccaaaatggacaaggcttacctagatatattagttaaggtaggccaactgctgtatcaaatagatactcagatatataatggttccaacacaaatagaagctcatttctaggtcatctaacagtatgagtaggtgaattcactggaggagtagtcctctgctacaccatcattcaggctcatggagctctacccttttccttgtgtggggtccttccttggtcatgctaggcatctatctatgtcccaaccagctaaaaggagaaactggcatgaaggaatgtgtgtgggatgttgttaatagacctggcctgaaagtggggactaatcactttctttcatggcaagaacccagttatatgaccttcctatttaaaaaggtggctgagaaatggaacatagctgtgtcccacatagaagagaaaaaacatgaattgtacttcatagctggcaatctctgccagagttaaggatgaagaaaaactacattgtttttccacattccatcccagcaggaaatcatcccatatccactgatttatcaggaaagataggccaagccattcttactttgtattgctactctgaatgtggagagagttattttgcaagatccccttttctattctccttgcaaactcttggtgtcccatgcttttgtaagcaatggaagagcttggtcccacctgccatcttggtgctttgattcatcctccaggaaagcagaagagtaaattcaagaaactacatcctatgaattgggtgggggaaagaaacaatgttccaaatcaaagggaatgtaagttaatagataagaaaacacatctagaagaaaaacagggaagaaatacaaattagagcaacttctattccaaatccatggtagtaaaggaggaatccagagtatgtcgaaattctaactgaagccgtccagtattttctaaagaagggttacatccttgactaaaagcctgtattgttttccatcagcaggtcaaaggatgggcttcagaaactctaagacttcctaaaattatatgagtaatattgagtggggtgttgtatttcattttttgttttttgaaggttcagggcttttaagaggatcctaaagatatttatggcccattgactttactgaaatgaatttcccagcatgtcagtcctgagagaacaagacagagatccagggactgtaacaatatgagagctctggagggcagccccctcattagtttaatgggaggacctgaggtgcagcaaagctgaggctttatcagatgctctctaaggtgccttccagttttatgatcaacaagaacattgactgattactcagtcaccagagctgagagcctgaggctcctctaagtctttttgaccagtgagttcttgccttcaagtcgggagaaactctcagatgaaagtcaagtggttggcagtgtactgaagagagccagtggtctgtgagataacttggttttaggtaattttaaaggtaaaaacaaaagctaatgatggtaatttgaggcaattgacttttaggatcacagggttccaccatgctttctgctcttcgttggaactttgggaatctcatttaataagtggtacctctcttctctgcccagatgatgtgtttgagcccactgaggctgagaagccaggcagatgaagattataaagtacacttgaataatgatagaattcttactgatggtgatttcagtgtgcagcaacaatagttttttttttttttaataccaagtcccctaatctttatagcaagattaggcattccagctcagtcatagcagcctggaaatattgcagactttgctctgcagaggcagaagttttgctgctcattgctcctctttgtagggagaagatactcatcagaaaagggaaggggttgtggccccatgcgcagtccccaaaatcagacaagctttttctcccaagaggtgagattaagactggagagctctctgcattagacctgttactccaataaggtgtccctgtagttggaagcctgaaacagtgcaaagaggaaggggtccatcacaagtctattcatgtccacataggcaagcagttgccagctacactcagaatcatatagttccttcctctgagaccaggagtagggaggcttgacccctagcttaactggtgataaaggattagcagctaggcatactggttcttgagggatgctgaccctgtttggagagggcttatccagatttgtccctttggttttagccattaggtactcctaagtagacccaggcaccaatgaagaagtgatgctggctgtcaggagatgaggttcttgtactggttgtccagtgaccagactctgtttattgtgtttgattcttcctttgctgtttttgaaatatcgtaatcattctttaaccatcgtcctatttatatagaggagaacaatggaggagcgttgtattccattcccgaggaagtggttttcccaaatttttataataaaattttatttgagagtaattttagatgtacagaaaagttgcaaaaatagtgtagagaattcccatatatccttcactcagtttttcctcctgttggcatcgtatggaaccagggtaccttggcaaaaaataagaaattaacagtgacacaaattattaactaaactacagactttgtttggattttaccagcttttccactaatgcacattttactgtctcaggattcactctgcgataccaaaccagtcttacttaagggcagtggaactaccgtggtcaaagcaggggtgaggggatggatcccccattgcccacagtctctcctttgataccctatgccctcgatgcacccttaggagcctccaggattccatggttcaattttctgcaacagagataggtgggctataagaccccctcctgcaaaaccagtcccagaggtgctgagaaaccctattttgtgagcaaattataactccagattcttacaagaatcttttagaactgtgcagtctggggcagccatcttcatatagcaagtggacagggctggagttactgttctctgctggagtttaggagtctagaggaaggtatgggatcttcttaaattcccagccctaaaccatgcgtttgttctcttcttcagctttgggagagggtgctttgtgctaatcaggagacgtggccacagactggagagacttccaagtggggctcagagctttagttacctgagcatctgctgtaggactgggtgtcgtgatatgcacatctcaggtgaattttgaaaaacaacttaaatgctaagacctattaagttgtacagagctgctgagggaatgaacacagaaggaggtgtgtgggatacatttatgctaattataagtattacaaccttatttccttgattaaagccagtggatctgcacactaattatctacaaaatatcagtcactttggaatacaaaagtctgttgagggacagggctgagatttaggacatcttggtctcagtgtcagttctgtgtccaggttccaaatcagagatttcactttcatctctaaaatctggagtttggattccagccatatgatctctttggggttttgccttctgttgaactaagttctgtgtgtaataataagtgagaagaagacttgatttttttaggataggagggggacatggccaaaggtagaataataacgtcaaagttgtcttaaccagtctgtactgttgctttgaccctagaccatagctcttccacatctcagccccgttttttccttcctgataaaataaaaaaacaaactccagttttgaagcagactcttctacattacctggatctagtttagtgactgaagtttaatttctgctccaccctcttcttcttctttgagatattgaggataattgtccaagattcaccctggtgggtagaagaattacctgaacagaatttctttgtatttttccaaggatgaggattatctaattattgctatcatctttgcactcctatacctccaccctttctagagcattttatactttatttcaatatggtggtaatgttggggacatctacctgcaactcaggtattctgaaaagtatagaactgaatacagaaaagaatctggtattttccaccctgggacactccggcaatctggagagaagatgacgtggagagggcatgatgaccaggaggttgaggtgcaaagaaccgggctctaacaatgaagtgatgaagttattttgtgaattctccctgcagtggcctgaggatattagtcctgggaagtgccctcccatttttgtttttgggctcttggcagccagtgacaaatgtgggaactagaatgcaggagtagaagccaagaagcctagattcagtctctctgccatgactcctgacatggaacagatccctttcttgcccaggacctgagtttctcatttgtaaagtggacatttctcatctttcttctacactgtgtgaggcttttcatcttttcacaagtactggccacaccaatagcattattgtctgccactgcatggaaactaggttgagagtttgtgggatgtactcaagtttcctttttagatacatccatggctttactgctttttttcctggactgggactgaaagaactgagtcccagttcagtcactcggtttctttgatgacattgtctttagatcagtgttcttaacctcaactctagttaacacttccctctcatgaggttaaattagatgcttagtttccaaacacatttgcacatttgctaaccctgtccatgttggtttatttcctaccctcataccacattccctagccattcgcaagatccatgtgtgagggatgggattcaattcaattccttgtccatgtgctaagatgaatagaacacaaggaaataaaaatctcatagggaatataagaacagataaaaatgtgttgctctatcataagccaaagggaggcaaattgtataaaaggcagttaagaatgtctaaagcttatctaagtagaggaatggcatgggtcttgaggggttggttggcagtctggattaaattttaggaagatatctccatcagagaggttagcatgagcaaagtcatggaggaagcttggaggtaaggaaaccagaagaatgatctagaacggtgtgtgattcaactggccgaaactaaggatctatggaagatgcatggaaagaaatgttggtaaaggaaagaccaccatggcagcttttgaaaggccaactattttggcttaggtagtcaatggacagtcacagaggatttgtcatctgttgaggtgtgaatcaggtcatgtgtaaggacaattcataaggcagtggcatgtgggatagattgctggaaactaagaccataaaggcaggccattgcactggcccaggaaagaggcagtgagatcctgtgccacagtggtagccatagagtatggaagagaagccattagaatccatgggctcaggactacgaactggagactggctggtcccacaggctcaaagccacttgcagtttgtaaggggcaactatgaaaacaaacaaacaaatacaaaacaaaaaaaaaacacaaaaaaacagtgaaatggagggtcaggatgtgtcttcatccattttgaggtgctataaaaaacacttgtggctatgtaatttataaagaaaagagatttgattggctcatatctctgaagactgtgcaagaagcatggtgccagcatctgcttctggtaaggacctcaggaagcttccaatcatggcaaaggaggagcaggagtgtcacatggtgagggagggagcaagagagagaggaaggagtggtgccagactctttaatgactagatctcatgggaactaagatgaataactcacttactacctggagaatggcaccaggccattccctcagggatccacccccatgattcaaacgcctctcaccaggccccacctccaacactggggatcagatttccacatgagatttggaggtgacaaatacctaaataaaccaggatggatttttaaattgcatcttttaggccaccaagtccattctgcatccttaaagtgttagaaacaacggagcagatgccaaatcattcaattttaaagaaatatatagctggaaggagccttaaatgtcatctatttcacccttgagggaccaggcagaatagcatcaaaatcatcccagacagatggtttgctcactctattccagtgcatcttctgggattccacaggtttccttccttattcctttcagctgtgggagagggaagctattttcagtgagagatttgtctttttctttctaattattaacattctttagaagtgggaagttctcagttgtgtctagcgagaatcctacctgctacaaggtaagtatgtttcatcctatgtccttagtggagataaatgtggtttatgttataaaacagacattataagactcagaaaaactaagaagaacctcaatgtgaccaaaatggccctgtggccaggtgcggtggtttgtatctgtaatcccagcactttgggtggcccaggcggggggatcacttgaggttaggagctcgagaccagcttggccaacatggcaaaaccttgtctctactgaaaatatgaaaaattagctgggcatggtggtgcatacctgtagtcccacatgcttggggaggctgaggcaggagaatcacttgaacccagaaggcagaggttgcagtgagccgagatcacaccaccgcactccaccctgagtgatagagtgagactctgtctaaaaaaaaaaaaagccttgtgcttttcataggtaattggttatattttatgcattgtttgtatcttgactggtgggaaaccagtggaataaaaatatttagccccctaatcctgccaaaaaataataacctatttctgagggtggtttctagttatctcctaaacttagtctcttctctctgcagtttagaaatccagttgttttcttctctcattgaaggttgtgcaggcatgaggactgatactggggaaaaaagacggggaagatgccccataagaaaattctgagacgttgaagcatgcttatattggattctgtcctcgggaaaggagaggaaaaggctgaaggagaccattgaatctggtgttgagtcattcacgtctctctactcctgtggagggcccttacggatgtgtcataacaggatctccttttccttcctcaagtgcaaaaggccttttttttttttttcctgagacaaactgaatatataacataaaaagatacataaatttccatacagatatcttctttactagctgtaattaagatatttgcaagtaaagagaatgttgtgttcccttgacttcctcctggtagggaattgtatttctctcataatcctcatagcccaagattttgtgatctgtcagtgtctaaacggaaggaggaggaggaggaggaatcagaagactgggtcaatacaaagcatctgaaattcagaacttcaaacacagtttttactctcggttgtttttttctaggctttgctaatcccaaagagcaaagttggaggtaggaaagttgatagcccaagagcagatgggccgagcacccactgacattgcagtcaggcagatattcaattgaatcactgagcttctgctgagagctatttggccttaggaaatttacttaaattcactaagacttagattcctcatctgaaaaaaaaacaatttcttcttttgtgcacattaaataagataagtattcaaattgccagtacccattaggcacccaatagatggctattattctatgtaaaagaataaggtagaaattatatatcagaaattttaaaccattttaagttacaagccaaggttttccctatgatggatctttattgctggatactaaatttagagaggagaagaacctactcaagagaatttagggaaatttaaaataaaaaaagccacccactcctccaggactggtttagacatttgagttgatctgttggaagcccaggaggaaagagaaaacacttttaggcatctgcaggaagagcttttctattgtggagttagtagctacaaccaggagctaatttttgtaactgtggaccatgaattctgcagtagacaaaggtcttcagaattaaaacctccttctccagatgtccttagtgtgtgctgtccctcatcatcccagagggagagcttagggtgatgcacctgtcctggagccttggggatagagaaaagactggcttaagtccagctctacctcctttctcctttcattggctatatgatggttactgcttattattatgcatagcatgaaatatgcaagtgtatatgcatatgcataatggatgtgcaagttctttgtaaactgttggtttgagtgctggtggttttgtcaccaccaccaccaccatcaccacccccatcaccagcatcatcaccaacaccatcaccaccaccaccatcaccatcatcaccatcaccaacgccaccatcaccaacatcattaccaacaccaccaacaccatcaccaacaccatagccaccgctgttatcaccattatagtctgtgcttagtaaataaccatgtacaccctggaaaaataaattgaatccatcaatgttccaaagttgactggtaggtggtggtctgtactccagctctccaactctgccaatcatcacgacaatcttggttgccttcctccattgagtcatgctttccagcctcttcagccagcttggaactttgatttgcagcccggtttgttcttgtagttggtcatttccttacccagtgggtcaatccccaacttcctgatctttgtatttattttttcacatcctgagacacttgggtacatgtttgttccatacctcaataaagcataagttcccttgaaggcaaaggagctcacccacgtttagcacagtgatttctacattaaaaatgcttaataaaagttacttaattaaaaaatacataatactatattagatgtttgtaatgggaaaagagtaatgtccccacttgcctaaatcttcttacatgaatcctcattggttcccactcactgggcaccagtggtcagtatgtggggactctgagtatgcgtatttgaaagatgcactggtatcaccaagggaaagccagctggatctgattccctgccaatggccctgacatctgacatctgcttatcagtgcagaggactggagaaggtctcacaataattaaaatacccataagaatggagttagcaccaaaaggaaatttattattgcacacagagaatcacattattcaaaggccatagcatcaaagcatttgttctcagtgagctagtccatgtgggaagctggatcataatgtgaaagttgcttaaagaggaagaaatcagggcaaggatgttagaagagtcaaataatcaacgacatccagctaagaaagcctaacaacagggttcctggcttctcagcaggttcagaaatactccatgtcttttgcctaaatcctcctctctcccttgtccagagccaggaagggatgaacatctccaccatccagttccaaggctcattctttcccaggcctccaggatcagccagtgccccatctgagagatacattatttcttcatctgtatcaatcagggcacaatgcagccatgatagcctaagagccactcaagatttttcagacaaccttggatatacatccatgttttcattcattttctgctgatcgtaaagaggccaattgtattttcttcattttcaaatgtttgggagccactttattacagcccctaatgcttcccatgtcactgaattgctttcacacctaaaaatgagtccttttgttgcttgcaaatcttattgccttgatacctagtattacatgccccagggagggtacatattaatagatttcaagtgcctgttctgattgactggtgattgcccagagtggagtgatgagaagaatttggtggttgcatctaggatcagtgaaaaagtggtgatcagctggtgacatctgccatgaaagtagaaaagaggattggtggcacttgtgtcctgttctgacacatgtcatcctgagcagtgctctcaattcagggattctgctggaccctgttaggcatgctctaaccttggattcacacaagtggagggattctaatgtgacatagatattgagtttattgagtgcacctgtgttgaaggatcatattcagagaaaggggtttgccaggcggatctgctttactggggctaatttccccatcacataaatgagactagcatccccaaattctgaattctcttctactggcctttccctcacatttcaactaaatagttggattttttcttcttttcttacaacttgtatatagcaaaagtgccttgtttctgggtagatttgattcccctttacacactgccaaggtgtttagtagtctagatacagctttccctgccagctctatgccatcatctctgagccaacttttatcaatgtagcagcaggatcttgaagcatatatatatatatatatatatatatatatatatatatatatttttttttactttttgaaaagttgaacagcccaagatcagggtttgccgctagagttctgctcccaagcagacattgattcaattatcaacattctctggatatggtctatgcatttttattactccacccaactgttttgtaagtattctatgagagaccttgataaacgtctggatgaaatttgggtaagcatctacactggcaatcttgtgaaatcctgactagaaatgaagttggaggtcatctttcaaacccacttatttgacaggtgaatacattgaatgccagccagagagagagagagagagcagatgtccctcaagatcacacacctagttagtggtagagtgaagacaaggacattcttctcccttcctgtgaattcagtgctcctctctaaccaccatcaaagtgctatgaggtcaatgggctggcatgattctccctatttacagacaagtaaattaaagctcagagagattagtgatcaatccccagactgtacaataaatgaggggtggaattgggtttggtgttctggttaagttaggtttttcaagggatgagagtttacttgtgaatagaatgtttaaagagcacaccaatacagcacagtctccatgaggttaagtagaagtgtgagcttgtaataattgagttccatgatctatttttctaataaggctttgtggcaaggccattcaaggcaaaggaggaaaacaggatgacccaagcctagtcaacgcagcaagcaaagatgatttaatttagagattttcggctctccaatgtaatcttaaagcaaccagcagcaacgtgatttgaggtgattgtagtctgtaaaatgtaacacagattcagtgaaactgaagggcgaggaaggaatattagaagcaagggaggtggtgctcagagttgaggagtattgtcctattgccttgaaatgtgttgcaagaagtaattgttttaatgtttattgtgaaaatgtattctcaagaactttgattgacacataatcattcacagtagcttagaagttctttaagggcagtattcatgccttatttcactgattatataacccttgtacctaggactatacatgatatatggtagacatttcataaatgttcattaaatgacataaaccaggagacaggtgttcttctcagcgaatgactgatctgggatgatgcttaaggaccctaatttggaacaatcagagatcacaaagccaggtttcagtacagagatgtatgcaagggttgtcctccattattttggtgcaatgagtgggctctgcaatgtgttcctcacccacaggggtggcaagattggaaaacgctagagatagttgacacctgagggtggtgaagcacagtgctgcaggaagttacccttattgtgtgaaaatggaacagaccgtcctacaagatagtgggttctccatccccattgggtttctagaaaatccttagaaccacattatacagatgcctgtgctggacatgaggtttcagaagatgatctcaaagttttgcttttctctaattctgagatcctaaaagccaactctacaacagagattgcttagataagtgcaaagtggtagagcaatttaaggactcataattatgtacgtgcaaggaactgtgtcaagtatatattttcatgatgctatcaaatattaagccaaattcaccctctgcatatctacacattcacagcctgaatcctttcccacttcgctcatacctcaatacctgtcacttgccctgtctcttgtctctccctgtgactgtgtttatcttgctctgaaggctttcttgaggcatttctccctcctttcaactctaaaaatccacaatctatcctacattaaagaaaaatcttcatttgacctttctatcccttctaactttgcctgaatattgaaataagtacttttcatcttctgtcttaattttttgggcttctgatcttaccactgaattgaatctgcagttttggggtcactaattatctctcacgaccaaatttaaatttcttacttcaagtctaacccttcctgaactattgttgaatgacattattaataatttaccctttcccctgcaccccctgcaactgccagtgatgcatagtattcttgttgaatgcctcagttatgctttgttccacaagttataaccattcctggtcattctttccctgctccattggtttctctccttcctctcattttaagtttgggtgctgctattttagacatctgctttgcaaacctcatgcactcacatggttataacccctttttacttttacacagaatctgtttgaaatttacatttgcagcctccacttcttctctctttgattgcttaatctgtaagcctcccctggagagttcactggagactgaaacacggcatgttttaaataaaactcaccatggcctcctcctgcttctctgagtgctagcacctcagcaaccgttagcatccgtgaaaactctcttgggagcttcccaaaggggagccatttctgaacctgtctctttatcaccagcctgctatgtctttccttatagcacctcagtgccactttttctttgcacgttggcaggagctgcccgggtccatgcctggtcagtccaaaacctgaatccacgcacacaccttcaggcttggagctcttcccccagggctcctcgaacttcctcatccctcctgtgtttttggagccttgtgtgagtaaatcttcatttcaccaaaatataaatttcttgccctggcctactgggtcctgaagcccctgccagtctccttcctgaccttccacaagaagcccccttggctccatcccagccagtctgtccccggtggcccagcgccagttgcttatttccacctttgcatgaggccctctgtgttcatttgttcgggctgccatagcagtgctccacagactgggggcttcaacaacagaatctgattttctcactgctctggaggctggaagttcaagaccaaggtgccaacagggttcattcattcagaggcctcgctctttgtcttgcacatggctgcctgctcactgtgtccccacatggtcatccgtctgtgtggtttgtgtcctaatctcttcttataaggaccccagtcctattggattagggcccaccctacagaccccattgaaccttagttacctcatttaaggctctctctccaaatacagtcatattctgaagaacttggggttaggacttccccataatgagcatgtgttggggggcacacagttcagtccatcacaccttctcttcccaactgcccatctgtcctttctttcatctccgtcttctttctttctgttcgtccctccctgccatcagcactcagcaatccccatttcattgtcttcactggatggtcttttcagcctcaccctatgagtttgtgcacagggacatgttacttcatgaatctgcctctcctccaggtcattccagtgctgcttctctgcctctgactcaattgagagcagagactgtgtctcttgtctcttgcacacagcccttgacttggaagcacttgagaaatgccattgctaagttactgtgagtccctcctcatgcacccccctcctctcacttctcaggagccctttcaagggaaaggccttgcttaggagcttttttcctgagtggtgagggggaacacaaatgttaactccatggacagcaaggaggaggagggctgaggctccatggtggtgacattcagtgagttaacctttctaaatcaggaaggaaaggagagggaatctgggtagccctaaaagcagtggtgaattcagggattttctgcgggacacactaagagcaataattctctcagaagctttggagaaagcgctgtttctttgacctaaggggctgaaaattctagatagaacccacttcctctccaagcagtaggttggctgggaggctcctgctgggagtagaaccaagctcgtggagggaagcccattgcgtcttcatgtcccacagaggaagacagctgggtgtcatgtgctgggagtggtgtcatgatgtgctggtggagccccgagtgccttgtgtttctgggcggactccagagtaagggccttgaaggtgggttgctgcggtcttccgctgtcctccctaatgatgcaggacaaatgtttgaggccctgcccaggagagacacgccattcagttaaagatccccctgctttcctcatgctcctcctttcatccttccatgcttccttcctctcccttcatcccttttcttctctctcccccttcccactctctcccctcattcactgtcaggaagggccatgccagaagggcccgttcagtgtggtgtggcagcggcagaggctagcagcaacggcagcttccacagtgagtctggatttgatttctggggccagggggctgggcagggcagtccacacacagacagacagcttgcaggctttggagaggcacttccatgggctggggcctgcttccaacctctttttccttgcctcccaccgtggagcatcatttaacttccatggaagtttcctgccaaagccattgatgtgcttgggatgtctcatggggagacagcatggtggggggtggcgggccataatctgctaaaattaggtgcacagccgggagagccgctggagttcacatggctgccagggcttctgtccagacctgtgcgtgtggtggaggctgaaggctctgcatggacgagtggtttggctgctttcttgcatttcaggaggtgtgaccttgagttttgagtacactttgggtgcttacactccataggagactccctgtaaggaaataagaatgccctaattgcacagagtagagggtctaagaactggaggtctccccattgacctcagatgaagcgtggtctaacagacctgatgctcaggatggtcactacagatcctctgtgactgagtcagatcccccagtgcttgcagggaggcttttgccctccccattttaatttctatggtaatttctggcagggagatggacatactgcagagtcagtcgaagttccatctgtcttaccttgatcatcagactgtattggatgacttccttccactttttgcttgggggcttttttcttctatttgggaaacagttcacttgggaaaacagaaccacagaattcacctactcagccttaaagatccatcccagactaagaagacacaagttctgcttgccatcttgagaggctttccacaggccagaggctgcttcctaacactgacagggcgtgcggtagttaagtcagttttgaagtgagaagcttctggtttctaatatacagtattatcctgatactgcagtcttatgggcaggtgcatgggaaggaaggcttttacagtttcattcatttctctcataatttggttagggaggtaaattaagcataacctcccaggttctctcaggatcagttttataggtttctcttcttgacactgctcctaataacagcatgaaagtttaagattttcagtactaacaagtgtgtatagctagggtatttcagaacaaacatgcttggcagccttatgagaattttgcaagcagaaccattatagaagattaatcaatctcttctcatgcttttaaaatattgtatgtatttcagtcgcatcgggttcaaactcttggttttaggaactgacaggttgcattaaaatatcaaattggtcaaatttattaattaatttcaacaaacatttaatattaatcaactgtgtatgtttgattgtctaaagttggacccttctgagaatgaaaagggaagttattaataattaaataggagctacaggcataaatttagacctttcttggtaaattggggcatacagtcattttatccatgtatcctgagttattgttggtgccagtgatacaactgtgagtaaaacagacaaaaatcgctgcccttactgagggagataaaaaaataaagataaagtaaagtatatagcaaattaagagtgataggttcttaagagagaaggaaagcagagaggagaaaaagaagtacttggtggtagtaatagtggtggtgttggtggtggtagttagtgttgtgtgtgtgtgtagtttaggtagggacgtcaaagcaatcgcattgcttaaagaatacgaaatattttagtttatttagtttctccaaggagggctttcatgactcagctaaaacttactgtatggatgaaatcgtatctgaaaattctgagtccaaataaagaaatactcacaaacttcataatgacagaaagcaaagagagaaaaccaggtggctgtggcactggaaggataccttgtctgcttgatggtcagcacgggtttcatctccctctgacaccactgagacggcatcagaaagtgaacatggctgtggattcatctatttggggagcatctttgtagaaagtcccttaatctctgacttgtgctggccattcagagcatcttaaggcccttccttctcccatctgcctttctgtggggtaacggaagggcagcttacagctgctgaacacctgctctagccaggcaccttgataggggctttgagtaaattaatttgtttaatttattctgttctcatgaagacattattatagttccactttgaggatgagaacactgatgtttaagctcagaaatagaaaatagtggagccaggatttaaatccaggttgaattatgtctgaaattctgcctttatcagttagcctcagcatctttccacagataccagttggcaggaagtggaagtaagaaaaggactcactgggtgacccgaatgtcccatgtgtgggctgatttgcatggctggatcaggagcagtagatgtgttggggtggttgtccatgtctttgctgattgcgcatgaaggcacagcaacttctgctgctttgttttttgagtgttgtcactggaaatggggatgggcatgggaaattttgggggcatgagagtaaatcttcctgtgtggcttccatcctcggctgaggtggaggcttaacttcagtgagtcagtgttcctggggctcacgcacgttggaaggagggaccatgcatggtgtctatgtatagataatagaggtggggagaatgcatgcagagtgctgagactgaacaaaggtttttcgacaggggtttgagcgaagagttgagtttgaagataatcctaaatttcctgtctgtcttttgtgaatggaatccacagactgacctcatccagtcttaggatgctattagcaagaaacaggatgtctctggaccacatctcagatatgatggttatatttaacctaaatatcactgtgtaatgttgcatttatttgtggtatactttcatatatttcccagaaaacaaataggtaacctgttgttttacgcataatatggtaacctcctgataaggttatgtttcaagcaaatcaccatttagatgcggaagagagacctgctacaacaaagtaaagaattactttgggatgccaataaccctctccagttttctttttgtgataaagtagaagattttctacctgtgatgctatactttccttggagttttagagcatatttatcccagggtctctatgcatgtcaagacaatgtttcttagtttcacaacatgtgtcataggggtagagagaagccatactcttgtcatttggcaaggattttctttttcattacattgttaccatcacagaaatatactccaagcactgggatgtccctcgctgtggtcttctaactattgggtagggttacctcatcaagttttggttctttactgcttttagggacccttgtctagtttcccccgtcattttgatacttgagggctgaggaggaaagcatcattcatcttcctccataggatactccactttcacttatctgagttctccctctggtagaaacaaataagcaagcaaattagcttttcttctaaaatattaacgcatctcaacacagttggcttctctcttctgcatatgtgtgctctgtggagtcccagctgggaatcagggtaaagatgagaagtgtctggttatatttcaaactgacaaggatagtcattctttttctggttacatatgggccgccctgccactcacacatacaagatatgtcttaattccagaagggcttagctgaagcttaaaagaataatacccatgccttagacacaagtctgcaagggcacctggtcatgagtgtgcctcggtctgggaatctgcttagagacttggtcatagatgcatcctttacagcagtacgccgggatttcaggggtgagatgaacctaagaaaaaagattcagagagatcccaaaggcccatattaaaaggcttattgtggctgggcgtggtggctcacgcctgtaatcccagcactttgggaggccgaggcggatggatcatgaggtcaggagatcaagaccatcttgtccaacatggtgaaaccccgtctctactaaaataaaataaaaaaaaaattagccgggcgtggtggcatgtgcctgtaatcccagctacttgggaggctgaggcaggagaagcacttgaaccccggaaactgaggttgcagcgagctgagattgcgccactgcactccagcctggcaacagggcaagactccgtctcaaaaaaaaaaaaaaaatgcttattgtagtttcattctagcagggcatgtcttggtcatagacaggtcctttaaagtagcatgctgggatatctccccacccaaacaaacttagtatttctaaggaacctaaggacacacacctgtttatttccatgtccagggtacacaaggagagcataagacaagctttgttcacccctcttggcatgcgagtgttttccagccatcactgaggttgtggagagggtctggttgcagtgaagatgtctataagctagagattattctaaaacccactaggactttcccaaagtcaaacaccaatgtagtttaatggttttgaaattgtggaatgtggtttccccccttttcattgctatcccaagtcttgtgatccaagatcattaagactggccttctggggaaaaccaatacagtcccctgtgtaagatgcctgtgaatgtacagggtatcgcatgtcctcattagtttagggagtttggttgtctgttcttagtcccagtcctctgagttcttaactggagatttatccagagataagaaatctgcccattaaatagtaattaatctttgaactctcagttgccttagcattttgctttctgatgatctgaagaaatatagtgtctcagagcagagcaagcccctagaacaggatgataaaaggggcctggaatgcagtggggctcaggtcttcaagggaaggggttgtaggagctacagggaagatgatggaggaggggagggaatctttctggttgtgccatccaggaccactcactgagaatgttgccctagtctcgtgatgggacttcttggtctgcatcttatcttcaaagctggtcaagtccctttgcttccgcaattcttttgggacaaatgactcatgagaaattcatatgactacaagaattgtgacaccgcctcctgtctggcgatgatgtgggttctgctatttctagactggtgcccacctctcttgagccttagctggttcctctgattagtgctgcctcctctcttcctgccacttgtggctagccctaatggaaagtagatctccaggcagatgcatccggctgaagaatcctggcaccggggcaaatgcagccctccaaggaaagcttttagttcagacaccggtctcagagcccacaatgtgaactgtgtcctgtgaggctttatggccagtgaagctctggcatttgggtgcagacatgtagggtggggaaggagcaagggggagtcggggtgagaggaggcttatcgtagtttcatcctagctgggcatgtcggtttttacatgggcctctgggatctctctgaatcttttttctttggttcatttctagaaatagacattgtatttctagaaatagaaactaacttgagagtcgaattttctagtgttttctcaggattttttcagctgtgacagaaaactctctaccttaagcaaaaaggcaatgtactgtctttataataaaatttttgttttccaggtttaggaattatttctagtgttggcttcattctaagacctaaataatgtcaccatgtagagcctgttgcttcctctctcccttcttccttctcatctctactctgacttctttccataatttcatcatcattctctgcctctctctttgtctgcccaagaccatgatcttagagaaagagatgttaacgggaaatagatttccaaacaatcaaggctaatgtattttgaaaattatgatgacaaatgctgccacagttgaacacattatctgggacctagatgttcagtagtgaaggcttgtcctcgtcagggaggccttgccatcaggagcctagctgatgaggtgagaaattatcagtgccatttctacaagagtgggacgggacattatgcagagaaaagctccaagagaaagacacaggaagcaaagtccatgactggcttcttttttccaatctgtctatggaggaacatagatattttctgatgtcatctttatgagtgctctctgggctggtgtaggttcccatcttacttcattgaatctgctgatttagatatttctgaatgaaaattccccttcagcttttctgagtgttttatataaatcacatttataggatttctatcacattgtccaaaatgtgccaccctaacctatcaatttacatgccttaaaacatttttactaatgagtctttttttaatttagaatgtataagaactttaacttggtggtgaataagaactttggttttggaatcagaataatttgggtacaagacttggatttttctatctcaagcatttttgaataagatgcttaacctcttcctctcctttttcccttcctctctccctttctccctctctccccccctccccaactttcctccttcctttcttcctttctcaatacaatgctgtcgataatagtagttttcatagccaatgcgttttaggaggattgagcgaagcagtgcattttaattcatttagcatatatcctagcacagtataaacatgcaataagttgttctatatccatgttcactgggacaagaacttagcccaactcaactcccaaacttggaatgctgaaagcatctctttctacctctgttatggtggaggccagagcttcagataaattaagatgagggctctacccttggggattacctaccccagcactcagcctggcttgaccttttggggacccactaggtgaccctgagaaagatacttcatcccagtttcgttagcctacaaacaagaagtccacctgctcaaattccccttctatattttttggaaacaggaatgtgtgttaacagaggaggaatgcctttgaataacaactctccaactgtgatttctggcttcacatttaagactttcttgtaggttcatcctcagagcagtcctctcctgccttttgaccttgaaggagaagccaagaggcagggcttgtttataaagagagatggagcagcccacagctgcaggcctcagattatggcctggaatcccagatgctgcatggaggtacagctcctccatctctttcatctgaacctgcccttggcctacacccttcactgccaagaggcaccccaggacccagttgtagagtagcaggctgtgtggaacgaagtggacctcagagctctaaccttctcacagggccaggaggggcatccaaagattatccagtctctacttgaccaaatcatccccttttggaactggatgatccctaaaggtcaactagtcgaagtctttccctcaccctaccaattatgcagatgagaacacagaaggccaggggtgagccaggaggtatgatgcaaactaaggcagggccgtggagctcctgaattctggcccatgctctccttcactgcctacagcacacacacacacacacacacacacacacacacacacacaccctctgtaaagtcaggctgctgatgctgcaggtgttaggaagggccttgagttgagctttcgttcagtgttcttgatgtcctgattcagatgagaaaattatgctcatgcaatttttgagcagagaggaatcttagcaaaactctggtccaactatgtcattattccaagtatgaacattgagaccaaaagaaaacatgggctgccaagaccacaggatggcacactagtagaactgggacaagaacccagatgacctgagtctgaatccagtgctcttttcactaaggttcctggtttatcttggtgccagaccttccctctgcctgtccccattccaggatgctaaagatgcctctaggccttgccagggctgtgtggctgggttaatagatgcccctttcctggcatttcccagggaaaggcccaactagaaacctatggtgcttaaaaagagtggtggtacttctttttttgatgaatcaccttgcagttcccagagtgctttgactgctgttaccacccaacctcagacttccttgagaatttaacgctgttattttttccaagttgaatccccacttttaaatgaagataaaggactttatcaactgtttcatgtctgtggtcctgcaagtgatctatgagctctctcctctcagcagcaagcatccttcctttagaattaaagggtcttttttcatgactcaaagacaaatcccattttccattggatgaagagtacattcaactcccaagaaagctttaggtgtgtgagaaggctaattgtttccaccttctccttgcccttatcaaagctcctccagcagccagtcagtgaacagatgggaaattcagctccagctcagagaagctagataaggcagcctgtagcctgcgaaggacttgtatattctttatgtcctctcccatgatgtgcatccgactaccctttgcctggggatgtggccatcagtagtaggtttctgctgtgctatgtattgtttactgaagaaattaaaatatgcaaagtgttcctggtccccctttttgggctccctctccagctccttctggcattttctgttggcagttaataaaacaaaaggggggcccaaaggctcgggtctccctccagctagaatggttaatttggagtggtttggaagtagtagatattacctctagctacagttgtgcctttctggctgatctgtccaacctgcaatgtgtgtcctgactgatggagttcgaatgcttcatgaaaggggcaggggattaagggcacagaaattgagggggtgggggaaggagaaaggaggggtgggtctccttttgcttattatagcagcacaaaccagcaaagacttatctttcctcaagacagccttacgttgaaagagctacagtccaagacacttgaaaattactccctaatccagcctaaatctttaccatcccttaccactaattatgcccatctacctgcactcatagaagttccaaatccaatcccttaccttatttaaatcctggacccagagaatacctcttgcaaatatttataagatatttatacaacactactgacaccattacaactcttattcatcccaatgactgggctggcacttggtaagccccaagatatgttagtaagtaacagttgcaattagagttgttatggtgttagtagtattgttcgcttataaatatttgcaagaagcgtgctctgggtccaggatttaaataagatgagggactggattgaaaatgtctatgtgtgtcagcctcccaagtagctgggactacaggtgcgtgccaccacacctggctaatttttgtatttttttttttttttttttttttagtagagacagagtttcactgtgttggccaggctggtcttgaactccagacctcaggtgattcacctgccttggcctcctgaagtgctgggattacaggcgtgagccacagcacccagcctagaatccctgattcaaggatccaatgccatcatcttaaagctggtgggatattcaatcaataagagatattattaatgtcgcttaaaggatgactcagtgagcccattcctagctaagtttgccttttgtggaaaaaagtaaaaagaagcttcacacacagaatatgcagtctctgagcctagtccaccgtagaaaactgcacattctaaccagcccacccttgtcttcaaaattcactttagctgctcctcctgagtgtctaagccccgcttttgtaaacagcctgaatccaaggatccagactggcagtcacacagatctggcagctcctttaaactgcttccagaacttaggtggaactgccttgaacctacaaaacccacaaaaagaaagacttggagtgcggcaatagattaacttctatctctggctttaccatgctgactggctggcatatcatccctgaagtggtttctcatccatacatttgggattattgtctcattgtaagggtaattgggcagaatgtctaagtccttagaaaaaataggaagtgctgtgtaacacacatgatcataatcattgagaaattagcatctttcaaggaagatttagattcaaagtattatgtatgtgcaggtgtcttgaagccttgccatgcctctgtttcacttactatctcatttaatttctgcacatgttctgagtgtgttattattcccatttttatgcacaaggaagtcaagtcttccagaggttaaataaattctctatggttgcttagctagcaaagagcattggctgagttatacattatttccttcgttcttttggatcctctatttccttatcctgtatacacaggatatgtatataattctgatatgttataatttttatattttttggcctctaactatttagtaaagtcaatcttatttgaaagaaattatcttattttggctaaataagtctgaatctaaactagaacctaactctcagtacctgagctatgcagggtcagatttttcaaaatctaggatcattaaaaggatgtattctaccattgtttacttacgaatatggtattataacctgcatttgggggctgagtggatccctttgaatctagtgtgatccattgatctgagcttggttgagacctccagctttgttgagtgacttgagctcttttaacatcatcttaaaatttgtttccactagaagatattagtgcagccaggaggcctcagtggagccatttgcaaaaggaaataagggccaaattatttttcaactcacatctttggagttgaaatgtctgctctattaaaaaatacattgcttgggggcagtaaaggacaatgaggtgtcagaaagagtgctagaatttaggcaggattaagaaagaggaaaacaaaataagttataaaaggcatgtgttcctggggcttccctcagaactttgctcctggcagatgcagctctaggtaagagaactggggagaatcacaatgggcctatttatcctctaggctcacactgctaaacggcttggctctcaactccttgtatttttggaagactccaagggtttttcctaatcctggggctagaggctcagactgagacagccgttccactgagattctgctaaatggatgctgtttgcgtaaactgtcagaaagccctgctctgagggagcaatactataatgatgtctttgtgagttttcgctgcattttccctccaaagaatctcaagcacctactagacccggggctgagatattcagtttgtctctaagaagctagataatagtctgtcctgctttactgggaagaggagaggcaaaaagaaggcaagcaattctgacttaataagtcagaagtctgatgtcactgtagaaaagtcataacctcttgtataaagctttcatctgtggggtttccataactggggcgaggccacagatggacatgtatctgtgagtgcacactcatgtattgtagatcagaaatcaaaaggatatccaaactaatatatccctaaggcatgcacccacacaaactggggagaacacagagttctaccaggtgactcaaagtctatatacaccaggataaaaagaaggaaaactatagaactgtcgatgaatggagtcaaactctgtaatatatatacatgtatatatttttttctttcctttctttcttttttttttttttctttgagacagaatctcaccctgtcaccaggctggagtgcagtggtgcgatcttggctcactgcaacctctgcctctcaggttcaagcaattctcctgcctcagcctcctgagtagttgggactacaggtgtgcgccaccacgcccagctaatttttgtatttttagtagagacagggtttcaccatattggccgggatgatctctatgtcttgacctcatgatttgcgtgcctcggcctcccaaagtgctgggattacaggcgtgagccactgcacctggcctgtaaaatattttaagagatttattctgagccaaatatgagtgaccatggccatggccagacacagccctcatgaggtcctgagaacatgtgcccaatgtggtcggggtacctcttggttttatatacttttagggaggcatgagacatcaatcaaatacatttaggaaatatatttgtttggttcagaaaggcaggacaagtcaacgtggggaggtgagggtgggttccaggctataggtatatttaaacattttctggttgacaattggttgaatttatctgaagatctggatcaatgggaaggaatgttcaggttaagataaaggattgtgcacatgtaccctaaaacttaaagtataataaaaataaataaataaataaataaaataaaataaaatgaaaaaaaaaagataaaggattgtggagaccaagttgtattgtgcagaggaatctctcagaaagcagacttcagagagcgagcaggttgtaaaatgtttcttatcagacctaaaagggtgcctggctcttagctgattatctcccagatctggaaagagaggaaggaaaacaaagggggaaggagattctccatataatgtggatttttcccacgagagactttgcagggcaatttcaaggtatggcaaggaaatatattttggggtaaaacattttgatttttttccttgttatgccaaagtcagattggaaaataagtcatgatatgcaaggttaaataaaacccatgtgatgagaatttgtggtttctagggcatactccccagaccccttagataggaatttgggcaagataaaaaattccgagcttcatcctcagaaccaaaatgtaaacttcattcagagactcaatctgtatatttctgatttgtttgcctttgtgtatgtatgctatagtacagtagtacatttacattaaaaacaataaccagacactgtgggacttcagttctgtttcatttactattcttagtgacttggacaagtcattgcttttctggccaaggtttctatgtctacaagtaggctgggtaacttccaaccctgtgtgtttattagctacagctttagtgttgaatctttcctttcaagccctgggttctgagaaacttggatttgaggagctggacaaggtacagttacagggtagggctgctccccacccccacaaagatataccaggaatccagatgatatctggagagaaagtaggatgaaccaccaaagagatatgcctaataaatgatcaggtggctgagaagagagccaaagaactggttcaaaatacagtgtccagtatccacaactcagaatagtcttagacagtgaggagagagtagagcaggggaggaggaggaaaggtaggaactaggggagagtttctgaagaccaggctgctatttctaagattctggcagcctcttgcatatgtggggaaggaactattgagacataccaacagttggagaaggggggcagtgagaaaggttcattccaggaaggagggctatatcattctgattaactagtttaaaaccaaagcattctcttcactgcttggagacagaacacattagaggaagactttgggtctttcctcctccatttaggccatttatttctggaaatgtccaagggaagtttcaccaaccccataccatcagggaatgatcagggcaggaccgacaggcccaggtctgtatctatgactgtacacacgatgcacatgcattgtcacacacacatgtccatctaaaccacctccccacagtgtatggatgtgtgtatgtatattacatgtagctaacccattatgtgcagccatgcaagtgaattcccaaaccctctggaccaagagtgccgatgattttaaagactgttatggtggctgctgggactgctagtgggatcatgttcaaggtgactgctagccatagctgatgccgtcctcagacagccaagcaaggtggaacaggccaaggccactggggcgtgtgggaaaccagacttcccagggaatgacgaaggcatagatttagtttttcatgttttcttaatgcacataaccacttttctatgtgaatagacatggaatcaagaaagattaaattttaataaataaaaaaatggcacttaccataaatgacaccctttatgacaatctcctgatagaccatttatcattaacatatgttgccaaggttttaccactcttcagagttgtctcctccaaagtagatgagttgctttctcatgtacttcatgactcagcccatgcagattagggaatacagaggaagcttgaatccctccattggttccagaaatattatgccctgtgaatccacgcttgctcatctttgctgggtctcggtttctttatctggaatatgggttacttcgtgtcctgtatgcctcatcggagttgtgtgagtatagatgttttgaacctctcagtgagaagcaggcttctctgtgatttttggaatccaccagctggctccttctgtaattagatgcggaagcctgagaaccttgtagaacttagctgagtttctatttaacccaaagcggtgggttccctctaactgaagaaaagttgcagtcactcaatggaaatgagcaagacaattctcttttcaggaaaggctggcttagaagaggagggacagctgtggttgggtgagttgggaggtaggagattccccagagtggaacactgccatgcggggcattctgccccaagtagaacctggagcctgagaatttgtagccactagacttggaacaccttctgcaccacttatttctggccctgaggagtggggcaaagtgtgagccctaaggacttgaatgaaaaagatggggtttgggggtttcagctaggcatcccagggctggaggtggaactgctgctcttgctcccctcctgtcccattctcccagtatatagagctgatggcttgaggaggggtacgatacagccttggggaaagacaagaggagcaggactctgaactttgcaccattaaatgctcagtctctgtacctgtggtcttgaaatgtttatgctcctataagaatgttgaaaaaatatatatgtccgttgcacatcttaagttgccatcaaaaatcttcaaagtaattttgaatagttgcattcaatgtcatttccagaatattgtaaatattgacattaaaaatacatcattcctttaacacatctgatgaactttaagtaccagagcaatttggtacatcatctattaaacacatgaacaagttcttaaacagtcagttttacatggctcctgttccttgaatttatattttcattgcagttaccccactgaattttatctttatatatttttatgcatgaaatccttttattggccactctatcataatttactgtgacaaaaatatgtatgaagatttaaatttaacttttaatggccaatgatcatacatttctagatgttaagtgtttttggtttgagttatcattatgattactagtaatacacagaaattggaaattaaggtataattattagtgatgcacaaaaaagtcgtcgacaaaataatatacatatcaatttttgaggaatataaaagataaaatgtaaaatattaatggaaatgcatctcatattttcaattagttcatgtattcattaatgaatattgttttaaactaagaaagataaattgatggaaaagaaagacattttgttattgaaatgtaactcaattctttgaactattatctagttatactcctaaaatcacatattggactcttatcaaaaattactttcaatcttctctcagctgataattcttttaagtttgtccctctccagtcgtttgaaaataattgaaaactatccaacttgcaaacagatatttccccaatcattagagattcattttcaacacctgtaccagtattttatacagttccttccattgtactctgtagggtttcactcctgagatttagaatgggtgagaagtttgtccttccttttggagagtggtgtgtgcgtgcgtgtgtgtgtgtgtgtgtgtgtgtgtgtgtgtgtgtgttggggatgggggcaactggacaagggattgatggctcacaggggctctgcatttaattttagaaaaaatccatgtgagagttgtgcatctgcaaagtccctcaaaactatccttgcctgagtacacgctggatagacttcatgttctgcatattctggtttgaaacctcttgcatggacactgtactgtatctctgcctattacatggcacggaaattctagacctcatcccatgggacagtggctgttgctcttcagggtgtgtatggataacatgaggtatatataaaaagtgcacttccccatggacaataacaaaagactggaaacaatcaaagtgcctattaataggaggttagtgggagaaactgtggcatctttaagcacagtggaatcctctacagctataaaaagaatgagtgaacttcagtgaaaaaacccaagaacagaacagatatggtatgttacattttatctaagatagggatgaagtgaatgtaaatccatatttgcttatgtaagaaacaatggaaagataaactaaaaccaaacagaaatggttatctgtaggaggaagagaacagggtgaggagactgagcagagatgggacaaaattttgcttgaatgtaccttgttttgtggttttgactttgaaacagtgtctcagtttttacatcattataaagcaacattaaatcaaatgcaaaataaaaaacaaagcaagtcctaaaaattaaaagcaaacatgaaacaaataagcctaattgtgtattacactggtggcttcaccacacagaaaggagctactacaaatgactttaaaacatagctatgttttctacatgcccctagtaggtagattctaaggacagaaagagctgcaaagattgtaggttgaaggttgttttcagtaatcatattattagtaataatatttgaactgttattttgaaactctctctaatatactgtatattatttaaacaaattaggataaagcagataatattatgagtgttaataggaatcaagattttctgcatgagaaagaacacaaacataaaattaaagaagtaaaagctctgtaaatttgatatgagaaaaatcaataagaagtcatgatattttttctcttaagaaatttttttcctagctatttttataacaaagacctagaaataataaccaccccagtagagatgagcactccaacgatccatgttgtggtctttaaattccattgccctccaaaaggatccaggaatccctggagatatggctgattcaaaggctggagtgggaaatatacaagatgagcctagagtattattttatgtcagaaagcaaggatgctatgaagactatttattggcgttatgtgagaagacacaggcataggatttcatttcccaaagatgaaacaccaggcatcagaaataataactactaactacaatagaatgaaacacttcaagtgtgtgtgtgtgtgtgtgtgtgtgtgtgtgtgtgtgtaaagaacaagcattggtaatgctttccaaaaccaaaacaaacctctcattggtcacctctggaggatgctatgggatgaattcattattctaataactagcaaataaagagaatgaatttatcttaccggtcctgtataaacagtttccagtgtagccaaatagctgatgaaaggaactttttatttataaaagatttccagctaatatatgcagaaggaatactataattacaatgtctcccttttgcagccactaaagaaataatggacctgggcagtgatcatcagtgactgctaaaattgctaggtgaaagggaactttataatatcagattgaatccactgatcagtcttaacatcacaaagaagtttgcctggtgttgtgttacagaaggaagcaaacagcaccatttatgaacctagatctaatcagggctctggatacctggtcaggtatcatcaagtgttcctgattataggaaatgcggcaggtagaggaacaggtgaaataacccatggggatacagtgaaataaacagactttgagaaatttttgggacaagtgacccgggatcatcaacaataaataaataaataaataaataaataaataaataaataaatggaaagttggggcagaaggtaggggaatcctatagattaagaccataggagacattactaaatgtgatgtgtggatcttttctggatccaactttcaaaaatcacttgaaaacatttgggaacttttgacactgaatggtatttggtgttaaggcattattagtattttgataacactacaacaaaaccatatgtctctggttctcctaccctttgagtctaagtcaggggccacccaactctgtaaaagatcacatagtaaatattttaggctttgcaggtggcccctgttgcaactttaaggtgatctcttctgtaactattcaactcagcccatgcattatgaaagcaatcatagacaatatggaaactaatgagccagtcatggtgccatgtgcctgtaatcccagcaactcaggaggcagaaggaggagaattgcttgaacccgggaggtggaggttgcagtgagctgagatcctgccactgcactccagcctgggcaacaagagtgagacttcgtctcaaaaaaaaaaaaaaaaaaaaaaaaaggaactaataaactaacgagcatggttttatgccagtaaaactctgtttccagtaacaaatgacaagctataatttgttgacctctggtctaattcattgggtttgctgtcaagcctaggaatctatatttttaacaagcatgccaggtgcttatgatcaggcaaacagccctgggaggtgaatatagttatcccttccattttcacaccagaaaacaggcttaagtaggaaaaatgacttgcccagggatccacagctagaaggtagcagagctgtgtttataggggaaaatcctggctgccatgtcccctctctgccacattcaccccactggaggatgctaaggagaaacagggggagaaggctgggaagagcacaggaggagagagaagaaagtttttctgtgcattgtatccctaactcatcagtcttctttaggatgaggcagagccaaagggagtgagatagagcctgcacacgtgcagaaagcccagcggataaaaggaggatgttctggagcataatgtcaacttcctcaccaggtctgcaatccagagttgccagactttgcaaataaaaatacaggacaccttgctaaatttgaattttagacaaaaaaaaaagccaacatatttttagtatgagtatgttctatgcaatatctgggacataagtataattttttaaaatgttgttcaactgaaagtcaaatttaactgggcatcctgtgtttaatctggcagccctgctaacgtgtgaagcaaattagtaaaagcatttaacaaaatattggtgggaaaggggtcaaggtcaccccctgccaagggactatgggaatcatcaggaagctgcttacagggaaggttcagagttcacagagactgagcttctctggcttggccagatttgggaataggcacttgatgctctcctgtaagttcttggtttgtagttgaccttgacatggatatcctaaagcctgagttgatcaggtacctcttgtctctctacacaaaatctggaatcattcagaacccatctggtctctgggtataaaaggaattttatggagatagtgacattctcgttctgctccagcttgatccgtagtgtaccaggagtggtcatttttctgagaaacggtcttaataatgcaaccaggattgcattctttaattagtgctcattccccatgagcactttcagcctcccaaatttttcaaactctcatcctctttgtgagcatgtgtgataggtcagggaaaggcaatgatcggtggaaggtaccaaggtagccgtgggctcttccccagtgcaatccaaagatctgtttccctccaagtacttatttttatttctagaatcattccttggaatatttcctgtgccttattacttacatctcttttttcagggttcagccttaaaatccttaattatctcattgagagcttgggtcagtagctaatatttcttatgcagtgcttgggcaaggtaccctatcttcatctgtgacttggggatgatagaggcttctatcacacaggaatggagagagcttaaataagggatgtatgtaacatgctgtggccagcactcattattaattaattagcactattcttattgttcatattactgtttctggctagtttatgtctggctaagttttaccatgggacgtatttgtcaataattttttaccggggaaggctttgaccactacctttcccagacagggtctctccagagaatggtattggtcaccttggaggaagatcagcatggatttttatgggaaataaggaaatttgaggaaattaggtttgttatgctgcacagtagcatataaagacacacacaatgaacagttactgtactttgtgtatatacttttgcacttaacgatgctcaatgggtttttacatacataatctcattttaggcaggctgttgcttcactcttattttgaagataaggaaactgaagtgcacagggtgttaagtgcttgtcaaaagtgacatttagaacccagggcttctgacttccaacatcatgctctttgttgtatcacaggcttcttgaaatattttattaatagtccattcctggaagaatgcagtataaacttcatccacattggttgtgctgcttggttagaattttgaagattcttctcaggggagtctccatgaccaattaatatccttctgacacttttttgctcaaatacttaagtgcattacagtttacacccaggacacttgaatttctgtctgtaaaattgaggctttcaaactggaatacctcttctgggttgtgtttaaaattatgaaatgagatacacaccagcatcaatttttaggactctgttattgaaaaattttcatcaagagaaatgttcctatattcctgacttctattttttttacatcaacaaaccaagtgcaataaaccagtctatgatattctatcacaaacataatttttcttttaaaaatattaattttttgataaatagaacttaaattaggtccactggtttccttatattcgcacttttttttttactatttttaaattttcaagtgtgatacatgattatcacaaaatttcaaacagcatagaaatatatatatatatgtgtgtgtgtgtgtttatgtgtgtgtgtgtatgtgtgtgtgtgtatatatgtatatatatatatatatatatatagcaaaaagtgggatttttctctttggtcattactcacatactatagaggaagccactggtttgttggttttccgaacatttttctatgcattttcaaggttacatggtatcactatatatttgcatctgtatccacatatacatttttacatgaataagaatactacaatatatttttcaatgccttgtgttgtcacttaatatatcttagatatatttacatatcagtacacatagctctactatattctttttaactgctgcctataactttaatggtgaacaaatttttgcctttagaatgaatgaaataaacacctttaactcagtatttttgcttacctgagtgaattatctttctaagactcctagaggtgaaattgctgggttcaaagtcacttgcacctttaatgttgacagattctaccaagctgccctcagaaaaagcagaaacatttctcaccagtggcatttgagaataactctttcctcacccctctcaaacacaagatagcaacaatttttttcagtctttcccaattgacattcagaaatgtgtttctgttgttttaattggcatcttttcatatgtttgtggccatttctagtccttttgtggatcatctgttcttaccctgtattcatttttctgctgggttgcttttcctaactaatttgaaggagcactttgtattatatggattttaattctttgtctgttacatatattgtacttttttggccatttgtcttttagctatgcttatgttgtcttttgccatgcaaaagaatttaatttttgtaagttgtatctctaaatcttattcttgatggcttcttgaacatgtgtcttatttaggaaggccttccttttctgaggataaagaatacttttctaagttttcttctaatattattattgttttgttttttatgtttagctctttaatccatctggaaatgatttttgtatatggtgtgaggtaggtatctaagcgtattttttttaatgaatagttcattgtcccaacactttaattactaagccattgtttcatatattaaattccaatatttatacatgggtctgcctctggactctctagtttgttccattaataaatttgtctaccctatgccaaaatgcaatgtgttcattacatagtttgataaaatgctttgctatctgatagagtaactctcccttattgttctatttcaagtatatcttagtttttatcaaataattactactttagatcaattttgggttcatcttgtcaatttccatacaccatttcatttgggttttcatatatattgtgttaacttttcagattaatctaaagaagaaatgaaatatgtataacattgagtcttcctattcaaggaaatgacacaacttttcatttgttcagatcctcttttatgtttttcaatgcatttatttaaataaccttggacattttctgctaaggtttatgctgaggtgttttaaacacttctgttgttattgtacaaataatcttattttccattgtattttgaagtcattgccaccggcatgtgagaatagtttgatttttgtgtgtttctcttatttctgggtaggctgctaaatcatataatggttctaactgctttttcgttaattgtcttgaatagtcatatcatatccatacaacaggcagtttgacgttttgttttcaatatttctacctcatttaaaaaattcttgctttattgcattggttaggacctcttgaaaaatgtcacataaaattcgtgatagaagatactttgtattttcctaacgttttgtcagtaaatatgatatttagtatatttaataaaggaagttaccttctatgaattagacttttaatcagaaaaagatgttggaaatttttggcatttttgaaaatatggtttttcttcttttatcttttaatttagtaaatttaacagtaggttccccaaggttgagacattcttacatttctagggtaaaccttattgagctatatataatatggaattcttgtaatatagtgctgatttgataaatattttatttgtatttggagagtatattcataacatagttttacacacatatagataactatgtatgttgatatttattatgtaaatatacatgtaaggctgtatgttaaatttgactgattttgtcttcagggacgtttaaaccacatagaatggtttgggaaagtttctatctttttttgctttgaaaaagtataaataagacagaaaactttaatagaactcaaccagaaaactatctgaaccttctagttttttaatgtatagattttttttacaattatggtttttgtattcaacttttctatttaacttttaaaaaattaatatttttagtaaaccaataatgcatgtatactttcaaatttatggatgtaatagtcttaacattttacatttgtctcctctacatcccttattaatcttgccaaaagtttatgtaacttttgagagaactaacaattgattgtgtagatcaattctgatttttattttccttttggctggctgttttgctttgtttgttttacactgattaatcagtatttattttattttattgtttatttcttcttacttttcttgcatttgtttagtggatctttactgccttttttttttttcttgctgaatccttattaatttaattatattttcactattttaaaaataaatgcttaaatgctgtaatttttttttcaaaaattacttcagttatatttcatagatttcaagaaataggactttagttattgttacaataaatacttttacattttattttcaattttttctttaccaaataatttaattgcccaaagacaacttttaaaaaattattctttcttgttaacttttattttattatatttgatacagaaaatgtttcttatttttacttcatatttattttttatcttggaattccagttttcctttgagatttaatatgtgattggttttgatactttttttaggtaattgaaaataatgtgcaattttttaaggaagctgaaagatgcacacaatcacaacactcatatctacttattgaaacccattatttgtatttttaaagtgtatcttcatttatgttgtcttcttgatctttcaatttgtgaagcattttagttttccattataatgatagctttgtcagttttcttttatttataacttgtttttactctttatatatatatatacacacacatatacatatatatgtattatttctatatatttttataaatttttatatattgttgctatattaattggagcataaacttcatcatcgtaatggtgaattttaccagctttaaatataatattaattatgatataaatttaatataaattatttagtcttactttagtttttgacattttgaatcctttttttcacatatatatgaaacaacagacaacgtgtaaatcacaataaaagaaatgtaattggctatatatatctgtatatgcatatatatatatacatgtatatgcacatatatgcatatatgtagccaattatatttttcttttatgtatagttgtatttttagcactcttccattttcaatgttttctgccattttgttttagacatgtctattttaaataacatgcaacttgatttttctaacctaaatttctctctcatttaagaggtgatataactcatttgtacttattgtctctagtggtgttttctaagcttcattttcattttgtgctttttagtcatcattatcctactccgcctttctgtagtctttttggtattagttaaagattttggctttatttaaaaaacggtttgaaagctatatgtactatttctattctagaagctactttaaaattttagtaagcatatttaaatttaaagtgttaatctcaacaattaatcactgtaagcttcttttttcctttctataacatacagcctttatcaggcttttaattatttctatatctactcttctatgcatttatggttgaaattattggaaagtttcattccagataagtatgttagttgtatcagtggtagtactaatagcattattagtattattatttactttatgtctctattttacaggaagcctttattagtaattgtattacttttactaccaaattaacaaccattattcaaatttaaattgcatttttgtggcttatttgctctgcattttttgttatgttccaataattgcatagcttgggttatttttactgtttttctagaatatgtattcaattagcttggctcctatattttctgaaaggatgtgagtggtaagctttctgagtctttgcttgtctgaaagaagtatcttcagttttctttacactggatacaaaactatcctgattagaaagtcccaggttgaaaataacttttctggctaggcaaagtggctcacgcctgtaatcccagcactttgggaggccaaggtgggtgtataacttgtggtcaggagtttgagaccagcctgaccaatgcggtgaaaccccgtctctactgaaaatacaaaaattagccaggcatggtgtttcatgcctataatcccagctactcaggaggctaaggcaggggaatcgcttgaacccaggaagcggaggttgcagtgagcggagatcgcgccactgcactccagcctgggcagcaggagtgaaactctgtctcagaaaaaagaaagaaaagaaaagaactgctctgcaaacttgtattataatttacctcctaaaattcttcaagtggttaaggcaaacatgatttccctttttggaaacaagattgcccatctcccaacttattcgttcttaattattcattgttattatttctctaactgaccccccatagaaataagaactttaggccgggcgcggtggctcaagcctgtaatcccagcactttgggaggccgaggcaggcggatcacgaggtcagaagatcgagaccatcctgactaacacagtgaaaccccgtctctactaaaaatacaaaaaattagccgggtgtggcagcgggcacctgtagtcccagctactcgggaggctgaggcaggagaatggcgtgaacccgggaggtggagctggcagtaagccgagatcgcgccactgcactccagcttgggtgacaaagcgagactccgtctcaaaataaataaataaataaataaataaataaataagaaagaaggaaatgagaactttaagtaatacctcatccggacataaatagacaactcttttttcaatattaagtagtttttttaacaatgagttccatgtattaggcaaaagtttcagttcctgaaaatctatttactaatgatgcagttagttcctgagttttcacacatgctgtgaattttctcccacttatgctaacatctctagcctgctgggcaaagaggagttccctaatgtttttctcagtaaagggtaccctgggtgtttatccttgtcagtcacttccttttccccttggctttcagtttggcagattcacaggtggttgatatcctccttaggctatttttaaagactctccctactgtcctttgagatcttactaagaactgtggtgaattctctttctgtccatctcctaccttattagcacgtggtcttccacgcttttggaatgtctctgtctccttcacttgaaacactgagtcctaaattgtggtgagagattcgagattgtcagttagaagctaaagttctgcagatcagatgcacatggaatatactgtgccactgcagccaagaatctaacctgatgtttgcagatactgatccttggtgactggcttagtcattctgctgacttcttgctggacttgctcttaaggttagatttttctgtagtgctagattctgaaaccttctctctcacttcagattaccttgatctttctacacactgagtgccaaggaacctaccttccctcaggtgttacctctagttgctagtctagctgtctcctttatcgtaggtctccaaagtcagcatcttcacacacctctgatagaagttgcataaagctgtgactatcttagaataggatgcatcaagagtgcatctatgtgtgaagagtgcagacagataacactcattctggccatctggtcactctgtgtgcctctatctcaaccccttttaggtgggaggacacaccatgctccccattcgctggatgcctcctgaaagcatcatgtaccggaagttcactacagagagtgatgtatggagcttcggggtgatcctctgggagatcttcacctatggaaagcagccatggttccaactctcaaacacggaggtaaaaagggggtgcgtaggaatcttgattgggggagggctcataagagctatctcagcccagaacttggacctactgaacaagacattaggtgggatttagagccagcagagtgaatgcaggcattagtgggagcagagagcttcttagtaggaaaaaaaaaatggaactgtaggaaatgtggtgtaattgtcaaaagagcatgaaatcagaggtctaaattgagactcaagtcatgcctctgttaaatctgctacccttaaaaatcacaaatgtttcactatgacaaaaaaggaaaacagaacagctatgagtttttcaattgtgccatcttgtggaaacacccactacttagtatgcccacataatctgggtgcacaaaggttttaggtatgccaagcccagggatgtaccagatggtcaatttgggaagaccagttttataactggtagagtcatgtgtgaacgtctaggaataaaataaaccgtgtttattttattactatgtttttactatgtttattagtatgtttactgttaaacttagtaataaatagccattatattttttataattgtaatttgcaataataaaaaatgctagtaaacataaattaatagtagctgacatttagtggtaggcacttttctaagcatgttagctctattaattcagtaatttttgcaaaaacacctgttgagattcaggttaaaggaagggggtctgcttgaggtactgaaatgggctggccagggtctcacaggtaagagcctccaaagcagggacaaagcctgggctgtaatcctaggactcctctgcctccaaagcccatcaagatgcttctcagtgatgcatggaccatgccatgttgccccagggaattcagtgcagtttgtaggcagtaaggagctcagtctttcaacccagtcgacctatgaaacatccctatgaaacatcgcaattctttttatggtcttctgtttgctgggaaaatgtaaacacaagacccttttggtattgaaatcttatttgaatattcaacagagtgtctttcttcttggaagctatgtttgtctctgctctcctatgtcttgaccacttgattaagtgaattacaaagactgaaaagaaattattttttaaaacgtgtactatctcatgattcacaagctcagtggggcctgaccacatttcccaaagtagaacaaaatattttaacaatcttttaaaataatgaaagtatatatactagaacccatttgttatggtgtttaagaaattgttactgttttcgcaggggaggaagggttaggaacacacacacacacacacacacacacacacacacacacaccatgcatgcacctgaacactgcctccttgtagtttggtggccccagtaaacagaggttctgggctgaggttgctattggtcttaacagaagactcagcatctgttcttgagctggctcatagcagctaacagggtgtttgcagtttcttctaagactcacagaggcattggccttaaaggcaggctttctgccctcagccacttcccccactccacccaccatagcagccacatactgacagtctctgatcatcggtttctccatggaaatcaacaaacctggatagtccaacattagaagagacactcccaggtgcctttgatcttggcattagcagctgctactgtagttcgaactgaatcccttttcctggaggtgaaggtaatggagggtggaaatgggtctctaatatgaatggggaatataagcagctggagacttatcaggctggtaaagaaatgagccaaggggccatcgtaaactccagggtgaatataaccaggcggatgctgacacagtgatggtttgaccagccctcccaaagtcagcgtgacatgagacaatactggaaacaaggcactgttgagcagtgtagggacatgcaaaggagaaaaaagacagtgcttttacctaattagatacagactaatggtggcagagaagggaaataatatttgttcagctgctgagctagagattattctttgtatttttatcattatgaccaatctttaaatgcagaaactgaagttcggggtcagtgacttgaccaaagttatgcagtggtagagttagggagaagtgaaaaccaacctaaaaactagacaatgaagccttgaaaatgcatatattcagtgtcagtaaagaattatctttgaggaattggaaatgcattgcaaattatacacttgggtctcaagtggcctgctggggttggccaggcatgcattacttgttttcttcctactcctccttatggcttctccttcagtatgttgggccatacagtcccttttcgtggtctcatttcatccttacaacactcctgggggtggttaaggcagacatttgattccatcttacagatggacatgctgagatcctgaggttaacagacttgaactggccacccagaaggcagtggtgaatcaagcagttagtcctattgttaaggactttaagagaaactggaagcatggtttagtgcaagcagcagggaaggatgggtcttgctgcaaaagggtcctatgtaatgactcagaggcaagtgtggtgacgtgcacagagtctgcaactgggagcctgccaggaatgagagataagaggagataggcatgcaggggccagagggtgcagagctccttcatggcagtttcaaagtgaggcaggctcatgaaagggggagggacaggtcagaagcccatgtccactatcaagtgaaaaatgaatgcagctcagtcatcctgatgagattcaggactagagaagaaaagtgaggtaaaagagaagagagtatggggagtcaatggtcaatgtgggcctggcccaagaagtggagtatgaagggcagcagaggactccaccagccactgctgctcactgcactgtgcaccagacagacaaatataccagtgctgtatacagcctagcctttagcttgtgcttgtgagagcctcggctctgcatagaaactaatccgggaagttgttgctttttgccgagtctgagccacaggaccaaggctgagctttgggtgtaacttccttgttcttctcactctttcaggtcattgagtgcattacccaaggtcgtgttttggagcggccccgagtctgccccaaagaggtgtacgatgtcatgctggggtgctggcagagggaaccacagcagcggttgaacatcaaggagatctacaaaatcctccatgctttggggaaggccaccccaatctacctggacattcttggctagtggtggctggtggtcatgaattcatactctgttgcctcctctctccctgcctcacatctcccttccacctcacaactccttccatccttgactgaagcgaacatcttcatataaactcaagtgcctgctacacatacaacactgaaaaaaggaaaaaaaaagaaagaaaaaaaaaccctgtaaggcagtttggcaaatatatatatatatatatatatttatatatctaactatctatcaatctatatctacagagagttaccttctctagtacacagagaagctgctgatacagaaaaccacaagactttaacaactcagaaactctaaaatattaataatacaaaggaaaattccctttgacttaagctgtggcccatgcttctaatgctacggctctttggagcagaagacctggaccatgcagagagacaatctttgggatgagagctctgggacgggaggagttaaggtggtgctcagtcgctgctgtgtgtgtctgttaccccggaagctcaccacaggcacatgtggggactgcatggctgtgctcagcaaagaaatgatgcctgagcagggtccttgcctccacttcttccccatttcctccacttcaggacaatgttctaatttgtccattctaaaaagtgtaatcttgatgcttttgggaatcaatgatggcacctacgggtaaacacagaacagacaaccccacaacacaaaaccatgacaagagctgacagcatccatcctgggtgtaagcttcttgctggagttgcaaaggatgtgtctttctattctcagaacttaaagaactggactttctggagtaaaagaaccacagaagaaaaaatagctgaaacctgaaccctgccaagacactgccacctgtcttttccatcattgcaaagattccttggcctcacctcccactttcaggcccctgggaagcttagggggttaggaaacaggtccccatgttatctttgaatgtagacacagcacgctttagggttgcaatagcaagagacttggttgcttgtaggtcattataacgaatgccccctggtcctctcagtttctcatcctgcttccctagatcctagaccccacttcctgggtctctactgagtcccaggtaaaccccactgccaaggaagggagccaggtctagtgagaggctgcagcagtgagtgtttcaggaaagcaagcagtggagtgggtgagagccagcaggggagaatctacttggcacctgtgccaggccccttggcattctcctcacgtttccagcccctgggaggattgatgcatctgcctttgagctgttgtgaaaacgcaggggctgagaaatcacttttgtgggctggggtagggggaagggctgaggcttctctgggagatgtccaatgagcggccagtgctgcaggcttggaatcttaatgaggcctgagccctgaccggagagagggaaggaaacatctgtgctggggcctgctccctctgccccagcactggggaatcactgccttcctggctgctgccacataccacagtggggccgacctctgggcctccctgtcacatgaaacatggaagccaacagcctggccccacagatctcctctgctggagaggagaggatgtgttcctcccaggccacggggcccctctgccttgccccaagcacagagctacctaagggactgacctttgccacactggagctcacctcccgggggcctctggcctacccttttccctgccagctgaagagactgccggcagcctggacgtcctggttagctgaaggcagctgaaatgtgggcctccctatgtggggtttagtactgaattatgtgtttgtggttttgcttctttttgtagacccacaaatatttttatttgaatagtaaagagctgtgctcagattgtagccatggttgggatttgggatcaacgaggctggttagctggactgggaggggaggcaggtgagatgggaatttggtgttggttttctcactgtgctgtgctcctagcccctgaggactttgcaggaaagctgtttggattgaccacctcaaggaactcctttgctgtcctatgacaattactcctcttgtctttccacctagaggaccgttatgccggggctgtgagttctggctgaagctgcacaatctggctttgatctgggtagctaagaacaggtgttcagggagggcatggtctggaggcgcctgagggaaaagtatcttctggttagaagtgaagcaccaatgctcctgttgcttcccttctcccatatcctctcctgaacaaacactgtgtggcttctgtcttcttggctgtgtgtttcaaaactgatagtcactgatgggctgggaagaagcaggagaagaactgggttggagatgggtggaaaactgggaataaggaccatgctatggttttatcttcagggcactgattcatcatggcctaatgaaagaaggtgattccttgggggaacaagaagcactgaaggagaccgcagttgtcagattgctgccaccttaggcccacgggctttcacgctgatcttggggtcatgttcttactgtgtccattgtaagcagctggctgtggaagagtgccagagagagaggggcagagaagggaagggaagcgagggaagacctgccatccttcagccctggctgtcctgtctatacagagtctactttgatatattagccttggcagattaaaaaaaaaaagatttattttggagagtaaaggaggcagaaaatagggccatggaaattgcagggtacactatggctctggggagtgtggcatgtactgggacacacctgtccctcctatattgggacaggactgataaggcttagtacactgtatcttaatttccccatctgcagaataaggggtacacctgctaatctctggccccttctagctctgagttcttagattctgacaacgttgtgtcactgtgccatttttctcaataccattctggaatggcaggacagccttgcataggtggggggcagttgccgctgaaggctcactgggcctgggcaaggctgagttccaataagacactcctctccttctttgccccttgtctcaacatttcggagtctgaagtgtctgagacgactgtaagccaggaggggagcatttggtcggcttcccatcctggcattcctacataccagaaaagcactgtcgacggtccatttatttatttatttatgaagagcctaatgtgatgaaatgtgttgtgaaatgacatcctattagccaatatggccactccagttcatttcaccctcattttcccataccaaagtccaccttttagaagaccatgtcacatcgcctctgagagcttagctttgaagtgagctcttttgtgtcttttgatgaacgctccagggcacccaggctggtctctctgccatgccaacctcaccggatcctctcctggactgagtgagagtgacctgctgttgggtgtccaccttggagtagggtgttgtggccatgggacctcccaattcttctttctttggatgtgaacctaactctgccctctaatgatatccctgaactctgaggggaccttgggcatcactgaacctcctctagtcaagaaacaagaaaaaggaggtgctgcttcctccattcagcagatcatgcacaaattactcctagacagaggcttcccacttgaggcaaaggatctttggtccttctgggttcaggttgaacattaatgttcttctctagtgatgcctactttgcggaatacactagtgcaagtcattttggtgctaaatactgcagaaaccaacaccaacgggagagctgtcagccagcttctggggctgcacgagactcaactcagaagtagaagtgagtcagccatgccgggagagtacagggtgcattggaagttaagtagaaaagtggcagggtgaaaagaccagcaaaatttctgattttgctattagttatccacgtggccttggccaaatcagcttatttctcatttgagacatttaagaggtttgtatagatatttttagagtccttttcatttttttaaagctaggttctggtcccacctgatatatatgtacttgcttgttaaaaataagagatgaagtgaaagataaggaaggagacgaagaaaagttaccaatggcaaaggattgattatagaagacaatgaaagaaggcctggtgactggtagatttgaggaatattgtacagggagccaggcagacaagccagagacttcatttttatgctcttcacaggaggtcactggcctagccacttgcctgcgtttcaccaggctgttcccctcagctagtcaaccttccctgttcaaaaccaacatgctaacacttggcagaaactattccaagatatggagagaggcctgcccatctctcatgcaggccactggaaatcaactctgggtcaaaaccgacaagatttttatcttttaatgcttattgtaagaggccgggatgtttgaaagagggcagcgtcttaagttgcagactattcaccaaagtccttttctattcaggaatgactaatgactttctttgttccccttttccaaaccaaacagcagcagtattaccttgactccaaagtacagtgattgcaatggacagtcttgagattaagggtctttttagtgctttgctcggaatctggagcaaggaaatgtctagggatgtttgttgaatgaacccacctgccagcagtccagagagctgtcccaaaggcccctgagatgtctattgtctgctttggtagggagccaacctgctagaagactcaagggcatttgccttagagagaaaaaaaaatggcacatttagttccgggcttgggtgctgaagtcactgtgtttttggctcctgaagctccactttcttttttcataccaaataaattgttttggccaatatttaaggatttaaatatttaaggttttgaaggaaaattccaagtttatgcatcattattaagacatcaatatgggcttgggaaaatgttttggtgttgcttaataatactgggagtgtcttctaaagaaagtatacatatatgtacgttgtgtgtttatttctatatattggattggaatggcttcaaagaaggcctgtttgaagtcagcaaattgatttcaatttgggattctcttttagccttaccgttcttggggataagaaatctggagatgaactggcctcagaaacattcaggaagattacgatgggaaatctgtcatcttgtaaagttggatcatttggtgctctctgaactaaattatgctgactaacattctgagcatctgaaaatcattcttcctggttgcctgatagatgaccacacaggagtcatttctatcacatcttatttgggggttggtatagacgccaccagcactgcagggaaaaccaccccctaggaggggtgagacagagagaatgtgagattttgatcattgattgctctttctgaaaggcactgctgaccatagtaggtgtggtgaatgtttgtgtcactgcattgggtattagaacttttgctctgagcatgggctgccctaccctgaagagctgaatcttggcttctgacagaagctctgcatgacacattctcctcaagcatattttccttattttcctatgaaagtatctatagtttgcaacaagaactgtctttggttcaagtgtcagtgtactagaatagatgcttttctgtgagacctgtggaggttggattggggtggggggtgttccttcaaagtacttggaattctttatcaaagaaataaaactcagattctcttctttctagtttacttctaagttccaaatttaaaacaagacccagtttgacatttgcagtaggagataatgtcttgaaccagtgagcttggctatctttctttcatcatagggaggcagggcagtaagttgtattaatttttcctaatcacccaggcaaatattgctttttgttcagtgtcgtgacccacattcatagcttgcaggggatacttctagctgacaaagctggaagtttctaatagaagatgtatcaagataacagaggtgaggaaaggcctgttgaacatctacttctgagaatcactgaggcactcaggtcttgcttttcagtttagtatcttacaaaaggagttggtttcttctcattttagcaatgataaatttagacatcttttttgaaaggccaaaggtagattgagagctcaaatacttacggtgtactctgacagtcttttattctatttttcaagacttattttatatatacatattttttatttccataggttattggggaacaggtagtgtttggttacatgagtaagttctttggtggtgatttgtgagattttggcacacccatcacccaggcagtatgcaccatatttgtagtcttttatccctcactcccttcccacactttccccctgagtccgcagagtccattgtgtcattcttataccttgacatcctcacagcttagctcccacatatcagtgagaaagtacgatgtttggttttctattcctgaattgcttcacttagaatagtggtctccaatctcacccaggccgcttcgaatgccattaattcattcctttttatggatgagtagtattccatcatacatatatatgtttgtgtgtgtgtgtgtgtgtgtgtgtgtgtgtgtgtgtaccacagtttctttatctgctcattgattgatgggcatttgggttgattccactttttgcaattgcaaattgtgctgctataaacatatgtgtgcaagtatctctatctcttatgtataatgacttcttttcctctgggcagatacccagtaatagggctgcgggattactgacattcttttacatgcaacatccctaaaacccaacaagacgtgtaaacactgaagtccaagtctgataattattctttcatttaagaagaacacatgggagtttcacatattatttttaaaaactaattttgtaatatgttaaatggtaggacacattcaattttttttcctcattggagatctgtccatgttctgtctcaatttaatagctacctggcatgtaactgatgcctctgagcctacctctggagtgaataaataaacgtggtccaggtgatttgatttctgccatttgtagtggagaagtaaatctcagtgaagaagattttttttcatatttcttcttttttctttttcttttggcttctatcctcctgcttccatgggactgacaatccagcttctcaaactccacgaaagtcttaatacagggtgaatcccagagccacaaacagtttggacttcaaacagtgagaaaattggaccgaatgattcggcacacaaagcagaaaactttcatttcctgtaggcaggatggaattgactgttatattaagacttctgaagaagccctgccctggagtaatttcagtgctgtcagacgatgttgacatctagattaacctctgtgcagtgaattttactgcaaagctcattgagatgcatgtgatgtgtctccacaaatcccatctggaacccgtggtggcccaccctcagcaaccctcctctccccactgactctgctttctctgtccataaacttttagcctccaggagcagaggagccgtggctgagatctgaccctaggagagggagtttgggccttctctgaccatgatgctgagccaggctttctgcttagagtgacagagattgtcattgtattgggtttcccctgagggaactgcaaattaaggcatgaaaaacactctgctgatgacagtttcacagcatatcttaatgctgcacaaagtgaaatggtttaaaaggaattagtgtgtcctaagtcattgagccctgctctgggctctgcaatcctctagggattcaagatcccattgcaacaaggtcatgactgcgtctaggccggacagatggattctgaaggacaaggtgtttgtcttttgtgcaggtctttcctatggtccttacaagagaggcagccacagctcctgtttctcccaactgggacaaaagatgtagctgttttctaagcactggtttgtcatctctttaaggagtggttggctccagaatgagccagactcactctataattccacattgtggcacaacagccacatagaacctcaaagctgaaattgcaacttttctgcaaaatagggccattgattacatccaaagttttgagaaaaggccttcaggttagattcagtcaccttcagactccacagagttgctcagcatggttgcaggcgtctttggaaacttacctcagggttttagaatacgttaccctgaagtctggataacaattttctctgagattttactgattctaattccctttgaaattgtttttcctacttgcctcttgtctttcatttaaataataagaatctccttgcatattcttaggtatttctttaggagaattggaagtttccagccaaggacactgtgtttatgaattggaaagatatctttctgggctgaaaaaggtaaaaatcatacggaggcaatcttgatgactttatttaaaagcaattatcagcattgtgttttattctaggtgctcgtgctcatagtgcaaactacattcacgtttttaattatttatgttatgatacttattcgtgtgtacatatatgcgcacacacacacacaaaagcctccacaatcctactggtatacaaatccatatgccccatttgtgtcgcttccgttgatctttgtgtgcatgcatttgcaatgaagtgtgcatcacatgtgtgatttcttaaagtcatctatagctcatctttcctcttattatcgacacataccctttgactttctgcactttggagctcatgaaattaaggctttttcaagggagactacatcttgagtttctttaaaccttcatatttaaagataggactggttttcttcgagaaacaaaaacttgattcagattttatttaattaattaattttctgggggaaatggtactgaatttgttcctgagtaacaaatagtagtaagtgcaaatataaatgtgaagtagtttaagcaggttattgaacctatcttgtggctgaaacaagtagtcagatatgaagctcagacactcaaattgaattagaacgtgaaccaaaacggttagcatggggcaggagaagagcactgggctaggagcaagcctgctagattgtcacttgagtgtccttagcttaatgtgggcatctgacaactagttgcagtcctgtgcccctctaattccagagatggggcaagccaatctgtttctcatccattgctcaagttggttatcactgaaatattatataccatctcaagatcctgccctgaacaagtttgcaaacatcccccccacactgaggagtcagtcccatttttgttttatggcagtttatctcttgtgaccctcctttggaagctgtccaaactctgaacacttgctgtccattccctgctccccaccccaccctttaaggccagggaaaagccagggaaagccctattggctcatctccctctttcctagcctgcacatcaaccaagcttgggatttagcctaggttttcagagaggaaaacaagtgcgttctcccagccatcagtatctttccagccccctggaccaagtgattagtgcctcattagcgcctcatcagttgcttttgcacaagagactctgggacaacaagcctattataatgcctcagtctgtctttttgaagtcaaaccatccttctggcttggttaggaaaggggagcctttctccaaacacgttttcttttaatttcctctgttgttttctggctgttaactatatggataaatggtaaaacataattttcattttttctaggcccctatgagagtggatatgctatatttctatagatgaggagttccacatgtcagcaaagcatttatttatttagtgaagtgactataatattgacacacagatttgcagcagcatccaaatcttgagggggaaaaaaaagcctttttcaatcaaatgaaaccttttctgtgatggcaccagagaggtttatatcttaagcacagaactgaacctgataatatgcttcctttctagaaacaaagagatagaagaaattgctgaaggagctggaagaccaaaccatctattccccaaatcattatgtatcaatagatacttcaactctgttccttaaatggctctgaaaaacacaaataaccatatttactattaaaaacaaattcataatgtctaacccaatcccttattttaatatatatacatattaaaataatcccatgtatatatgattattattatatgggatatatatagtttacatatatataggggtgtgtgtgtatatatatatatatatttacatatatatgtaaatgtatactttttaatgctggggatagttccatattgtttcttttcttgattccttctaatatattcaatgagatttataatttttttcacttttatttctttaggaaagagttggggtctattatgaatgctttctaggataaaatggcaaaacagatggaaagtgtggtagagggaggataatgggaataggaggcagagaacttgcacatttctatttcctgctgagagatcttggaaaaacattgtctgccctttacctcagtttcttaacatacaaaatagaactactatcaaccccctgcatgccacagagggttatttgagccctaaatgagatcataactgttaacata

SEQ ID NO: 1050 - DNA, 2342 bp, Homo sapiens
gcggcggctgctgcagctcctactgcatcttccttctcttcctttcctcgggctccggtctcggagtcggagagcgcgcctcgcttccagagcccccggacccggcgagtcagcgatcgccgagccggccaccatgcccggcagaccgcgccactaggcgctcctcgcggctcccacccggcggcggcggcggcggcggcggcgtccgcgatggtttcagacgctgaaggattttgcatctgatcgctcggcgtttcaaagaagcagcgatcggagatggatgtctctctttgcccagccaagtgtagtttctggcggattttcttgctgggaagcgtctggctggactatgtgggctccgtgctggcttgccctgcaaattgtgtctgcagcaagactgagatcaattgccggcggccggacgatgggaacctcttccccctcctggaagggcaggattcagggaacagcaatgggaacgccagtatcaacatcacggacatctcaaggaatatcacttccatacacatagagaactggcgcagtcttcacacgctcaacgccgtggacatggagctctacaccggacttcaaaagctgaccatcaagaactcaggacttcggagcattcagcccagagcctttgccaagaacccccatttgcgttatataaacctgtcaagtaaccggctcaccacactctcgtggcagctcttccagacgctgagtcttcgggaattgcagttggagcagaactttttcaactgcagctgtgacatccgctggatgcagctctggcaggagcagggggaggccaagctcaacagccagaacctctaaccttcctgagatcagcgtgagccacgtcaacctgaccgtacgagagggtgacaatgctgttatcacttgcaatggctctggatcaccccttcctgatgtggactggatagtcactgggctgcagtccatcaacactcaccagaccaatctgaactggaccaatgttcatgccatcaacttgacgctggtgaatgtgacgagtgaggacaatggcttcaccctgacgtgcattgcagagaacgtggtgggcatgagcaatgccagtgttgccctcactgtctactatcccccacgtgtggtgagcctggaggagcctgagctgcgcctggagcactgcatcgagtttgtggtgcgtggcaaccccccaccaacgctgcactggctgcacaatgggcagcctctgcgggagtccaagatcatccatgtggaatactaccaagagggagagatttccgagggctgcctgctcttcaacaagcccacccactacaacaatggcaactataccctcattgccaaaaacccactgggcacagccaaccagaccatcaatggccacttcctcaaggagccctttccagagagcacggataactttatcttgtttgacgaagtgagtcccacacctcctatcactgtgacccacaaaccagaagaagacacttttggggtatccatagcagttggacttgctgcttttgcctgtgtcctgttggtggttctcttcgtcatgatcaacaaatatggtcgacggtccaaatttggaatgaagggtcccgtggctgtcatcagtggtgaggaggactcagccagcccactgcaccacatcaaccacggcatcaccacgccctcgtcactggatgccgggcccgacactgtggtcattggcatgactcgcatccctgtcattgagaacccccagtacttccgtcagggacacaactgccacaagccggacacgtgtttcagagaaattatgttgaatccaataagccttcccggacattccaagcctcttaaccatggcatctatgttgaggatgtcaatgtttatttcagcaaaggacgtcatggcttttaaaaactccttttaagcctccttgttttgatgtcaccttggtaggctgggccctctgagaggttggaagctctaggcattgttctctttggatccagggatgctaagtagaaactgcatgagccaccagtgccccggcaccctttaacaccaccagatgggtgttttcccccatccaccactggcagggttgccccttccctccaatcatcactgtgctccttttttcccggcctacgaggcagctcctgccactatctttagagccaataaagagaattaaaaacctgtgcaccaggagcatcttttaaatacactagccattctcttgctttacaaaaacaacctaaccatcacaagaaagcctgatgaagtccagccgtgctccagcctcactttccctgcttggaagcgtggggtctcc

SEQ ID NO: 1051 - protein, 272 aa, Homo sapiens
MSNASVTVYYPPRVVSLEEPELRLEHCIEFVVRGNPPPTLHWLHNGQPLRESKIIHVEYYQEGEISEGCLLFNKPTHYNNGNYTLIAKNPLGTANQTINGHFLKEPFPESTDNFILFDEVSPTPPITVTHKPEEDTFGVSIAVGLAAFACVLLVVLFVMINKYGRRSKFGMKGPVAVISGEEDSDLHHINHGITTPSSLDAGPDTVVIGMTRIPVIENPQYFRQGHNCHKPDTCFREIMLNPISLPGHSKPLNHGIYVEDVNVYFSKGRHGF

SEQ ID NO: 1052 - DNA, 2175 bp, Homo sapiens
gcggcggctgctgcagctcctactgcatcttccttctcttcctttcctcgggctccggtctcggagtcggagagcgcgcctcgcttccagagcccccggacccggcgagtcagcgatcgccgagccggccaccatgcccggcagaccgcgccactaggcgctcctcgcggctcccacccggcggcggcggcggcggcggcggcgtccgcgatggtttcagacgctgaaggattttgcatctgatcgctcggcgtttcaaagaagcagcgatcggagatggatgtctctctttgcccagccaagtgtagtttctggcggattttcttgctgggaagcgtctggctggactatgtgggctccgtgctggcttgccctgcaaattgtgtctgcagcaagactgagatcaattgccggcggccggacgatgggaacctcttccccctcctggaagggcaggattcagggaacagcaatgggaacgccagtatcaacatcacggacatctcaaggaatatcacttccatacacatagagaactggcgcagtcttcacacgctcaacgccgtggacatggagctctacaccggacttcaaaagctgaccatcaagaactcaggacttcggagcattcagcccagagcctttgccaagaacccccatttgcgttatataaacctgtcaagtaaccggctcaccacactctcgtggcagctcttccagacgctgagtcttcgggaattgcagttggagcagaactttttcaactgcagctgtgacatccgctggatgcagctctggcaggagcagggggaggccaagctcaacagccagaacctctactgcatcaacgctgatggctcccagcttcctctcttccgcatgaacatcagtcagtgtgaccttcctgagatcagcgtgagccacgtcaacctgaccgtacgagagggtgacaatgctgttatcacttgcaatggctctggatcaccccttcctgatgtggactggatagtcactgggctgcagtccatcaacactcaccagaccaatctgaactggaccaatgttcatgccatcaacttgacgctggtgaatgtgacgagtgaggacaatggcttcaccctgacgtgcattgcagagaacgtggtgggcatgagcaatgccagtgttgccctcactgtctactatcccccacgtgtggtgagcctggaggagcctgagctgcgcctggagcactgcatcgagtttgtggtgcgtggcaaccccccaccaacgctgcactggctgcacaatgggcagcctctgcgggagtccaagatcatccatgtggaatactaccaagagggagagatttccgagggctgcctgctcttcaacaagcccacccactacaacaatggcaactataccctcattgccaaaaacccactgggcacagccaaccagaccatcaatggccacttcctcaaggagccctttccagttgacgaagtgagtcccacacctcctatcactgtgacccacaaaccagaagaagacacttttggggtatccatagcagttggacttgctgcttttgcctgtgtcctgttggtggttctcttcgtcatgatcaacaaatatggtcgacggtccaaatttggaatgaagggtcccgtggctgtcatcagtggtgaggaggactcagccagcccactgcaccacatcaaccacggcatcaccacgccctcgtcactggatgccgggcccgacactgtggtcattggcatgactcgcatccctgtcattgagaacccccagtacttccgtcagggacacaactgccacaagccggacacgtatgtgcagcacattaagaggagagacatcgtgctgaagcgagaactgggtgagggagcctttggaaaggtcttcctggccgagtgctacaacctcagcccgaccaaggacaagatgcttgtggctgtgaaggccctgaaggatcccaccctggctgcccggaaggatttccagagggaggccgagctgctcaccaacctgcagcatgagcacattgtcaagttctatggagtgtgcggcgatggggaccccctcatcatggtctttgaatacatgaagcatggagacctgaataagttcctcagcagtatctccagccccaagagccaccagcagggt

SEQ ID NO: 1053 - protein, 629 aa, Homo sapiens
MDVSLCPAKCSFWRIFLLGSVWLDYVGSVLACPANCVCSKTEINCRRPDDGNLFPLLEGQDSGNSNGNASINITDISRNITSIHIENWRSLHTLNAVDMELYTGLQKLTIKNSGLRSIQPRAFAKNPHLRYINLSSNRLTTLSWQLFQTLSLRELQLEQNFFNCSCDIRWMQLWQEQGEAKLNSQNLYCINADGSQLPLFRMNISQCDLPEISVSHVNLTVREGDNAVITCNGSGSPLPDVDWIVTGLQSINTHQTNLNWTNVHAINLTLVNVTSEDNGFTLTCIAENVVGMSNASVTVYYPPRVVSLEEPELRLEHCIEFVVRGNPPPTLHWLHNGQPLRESKIIHVEYYQEGEISEGCLLFNKPTHYNNGNYTLIAKNPLGTANQTINGHFLKEPFPVDEVSPTPPITVTHKPEEDTFGVSIAVGLAAFACVLLVVLFVMINKYGRRSKFGMKGPVAVISGEEDSDLHHINHGITTPSSLDAGPDTVVIGMTRIPVIENPQYFRQGHNCHKPDTYVQHIKRRDIVLKRELGEGAFGKVFLAECYNLSPTKDKMLVAVKALKDPTLAARKDFQREAELLTNLQHEHIVKFYGVCGDGDPLIMVFEYMKHGDLNKFLSSISSPKSHQQG

SEQ ID NO: 1054 - DNA, 3671 bp, Homo sapiens
gcggcggctgctgcagctcctactgcatcttccttctcttcctttcctcgggctccggtctcggagtcggagagcgcgcctcgcttccagagcccccggacccggcgagtcagcgatcgccgagccggccaccatgcccggcagaccgcgccactaggcgctcctcgcggctcccacccggcggcggcggcggcggcggcggcgtccgcgatggtttcagacgctgaaggattttgcatctgatcgctcggcgtttcaaagaagcagcgatcggagatggatgtctctctttgcccagccaagtgtagtttctggcggattttcttgctgggaagcgtctggctggactatgtgggctccgtgctggcttgccctgcaaattgtgtctgcagcaagactgagatcaattgccggcggccggacgatgggaacctcttccccctcctggaagggcaggattcagggaacagcaatgggaacgccagtatcaacatcacggacatctcaaggaatatcacttccatacacatagagaactggcgcagtcttcacacgctcaacgccgtggacatggagctctacaccggacttcaaaagctgaccatcaagaactcaggacttcggagcattcagcccagagcctttgccaagaacccccatttgcgttatataaacctgtcaagtaaccggctcaccacactctcgtggcagctcttccagacgctgagtcttcgggaattgcagttggagcagaactttttcaactgcagctgtgacatccgctggatgcagctctggcaggagcagggggaggccaagctcaacagccagaacctctactgcatcaacgctgatggctcccagcttcctctcttccgcatgaacatcagtcagtgtgaccttcctgagatcagcgtgagccacgtcaacctgaccgtacgagagggtgacaatgctgttatcacttgcaatggctctggatcaccccttcctgatgtggactggatagtcactgggctgcagtccatcaacactcaccagaccaatctgaactggaccaatgttcatgccatcaacttgacgctggtgaatgtgacgagtgaggacaatggcttcaccctgacgtgcattgcagagaacgtggtgggcatgagcaatgccagtgttgccctcactgtctactatcccccacgtgtggtgagcctggaggagcctgagctgcgcctggagcactgcatcgagtttgtggtgcgtggcaaccccccaccaacgctgcactggctgcacaatgggcagcctctgcgggagtccaagatcatccatgtggaatactaccaagagggagagatttccgagggctgcctgctcttcaacaagcccacccactacaacaatggcaactataccctcattgccaaaaacccactgggcacagccaaccagaccatcaatggccacttcctcaaggagccctttccagagagcacggataactttatcttgtttgacgaagtgagtcccacacctcctatcactgtgacccacaaaccagaagaagacacttttggggtatccatagcagttggacttgctgcttttgcctgtgtcctgttggtggttctcttcgtcatgatcaacaaatatggtcgacggtccaaatttggaatgaagggtcccgtggctgtcatcagtggtgaggaggactcagccagcccactgcaccacatcaaccacggcatcaccacgccctcgtcactggatgccgggcccgacactgtggtcattggcatgactcgcatccctgtcattgagaacccccagtacttccgtcagggacacaactgccacaagccggacacgtatgtgcagcacattaagaggagagacatcgtgctgaagcgagaactgggtgagggagcctttggaaaggtcttcctggccgagtgctacaacctcagcccgaccaaggacaagatgcttgtggctgtgaaggccctgaaggatcccaccctggctgcccggaaggatttccagagggaggccgagctgctcaccaacctgcagcatgagcacattgtcaagttctatggagtgtgcggcgatggggaccccctcatcatggtctttgaatacatgaagcatggagacctgaataagttcctcagggcccatgggccagatgcaatgatccttgtggatggacagccacgccaggccaagggtgagctggggctctcccaaatgctccacattgccagtcagatcgcctcgggtatggtgtacctggcctcccagcactttgtgcaccgagacctggccaccaggaactgcctggttggagcgaatctgctagtgaagattggggacttcggcatgtccagagatgtctacagcacggattattacagggtgggaggacacaccatgctccccattcgctggatgcctcctgaaagcatcatgtaccggaagttcactacagagagtgatgtatggagcttcggggtgatcctctgggagatcttcacctatggaaagcagccatggttccaactctcaaacacggaggtcattgagtgcattacccaaggtcgtgttttggagcggccccgagtctgccccaaagaggtgtacgatgtcatgctggggtgctggcagagggaaccacagcagcggttgaacatcaaggagatctacaaaatcctccatgctttggggaaggccaccccaatctacctggacattcttggctagtggtggctggtggtcatgaattcatactctgttgcctcctctctccctgcctcacatctcccttccacctcacaactccttccatccttgactgaagcgaacatcttcatataaactcaagtgcctgctacacatacaacactgaaaaaaggaaaaaaaaagaaagaaaaaaaaaccctgtaaggcagtttggcaaatatatatatatatatatatatttatatatctaactatctatcaatctatatctacagagagttaccttctctagtacacagagaagctgctgatacagaaaaccacaagactttaacaactcagaaactctaaaatattaataatacaaaggaaaattccctttgacttaagctgtggcccatgcttctaatgctacggctctttggagcagaagacctggaccatgcagagagacaatctttgggatgagagctctgggacgggaggagttaaggtggtgctcagtcgctgctgtgtgtgtctgttaccccggaagctcaccacaggcacatgtggggactgcatggctgtgctcagcaaagaaatgatgcctgagcagggtccttgcctccacttcttccccatttcctccacttcaggacaatgttctaatttgtccattctaaaaagtgtaatcttgatgcttttgggaatcaatgatggcacctacgggtaaacacagaacagacaaccccacaacacaaaaccatgacaagagctgacagcatccatcctgggtgtaagcttcttgctggagttgcaaaggatgtgtctttctattctcagaacttaaagaactggactttctggagtaaaagaaccacagaagaaaaaatagctgaaacctgaaccctgccaagacactgccacctgtcttttccatcattgcaaagattcct

SEQ ID NO: 1055 - protein, 821 aa, Homo sapiens
MDVSLCPAKCSFWRIFLLGSVWLDYVGSVLACPANCVCSKTEINCRRPDDGNLFPLLEGQDSGNSNGNASINITDISRNITSIHIENWRSLHTLNAVDMELYTGLQKLTIKNSGLRSIQPRAFAKNPHLRYINLSSNRLTTLSWQLFQTLSLRELQLEQNFFNCSCDIRWMQLWQEQGEAKLNSQNLYCINADGSQLPLFRMNISQCDLPEISVSHVNLTVREGDNAVITCNGSGSPLPDVDWIVTGLQSINTHQTNLNWTNVHAINLTLVNVTSEDNGFTLTCIAENVVGMSNASVTVYYPPRVVSLEEPELRLEHCIEFVVRGNPPPTLHWLHNGQPLRESKIIHVEYYQEGEISEGCLLFNKPTHYNNGNYTLIAKNPLGTANQTINGHFLKEPFPESTDNFILFDEVSPTPPITVTHKPEEDTFGVSIAVGLAAFACVLLVVLFVMINKYGRRSKFGMKGPVAVISGEEDSDLHHINHGITTPSSLDAGPDTVVIGMTRIPVIENPQYFRQGHNCHKPDTYVQHIKRRDIVLKRELGEGAFGKVFLAECYNLSPTKDKMLVAVKALKDPTLAARKDFQREAELLTNLQHEHIVKFYGVCGDGDPLIMVFEYMKHGDLNKFLRAHGPDAMILVDGQPRQAKGELGLSQMLHIASQIASGMVYLASQHFVHRDLATRNCLVGANLLVKIGDFGMSRDVYSTDYYRVGGHTMLPIRWMPPESIMYRKFTTESDVWSFGVILWEIFTYGKQPWFQLSNTEVIECITQGRVLERPRVCPKEVYDVMLGCWQREPQQRLNIKEIYKILHALGKATPIYLDILG

SEQ ID NO: 1056 - DNA, 2536 bp, Homo sapiens
gcggcggctgctgcagctcctactgcatcttccttctcttcctttcctcgggctccggtctcggagtcggagagcgcgcctcgcttccagagcccccggacccggcgagtcagcgatcgccgagccggccaccatgcccggcagaccgcgccactaggcgctcctcgcggctcccacccggcggcggcggcggcggcggcggcgtccgcgatggtttcagacgctgaaggattttgcatctgatcgctcggcgtttcaaagaagcagcgatcggagatggatgtctctctttgcccagccaagtgtagtttctggcggattttcttgctgggaagcgtctggctggactatgtgggctccgtgctggcttgccctgcaaattgtgtctgcagcaagactgagatcaattgccggcggccggacgatgggaacctcttccccctcctggaagggcaggattcagggaacagcaatgggaacgccagtatcaacatcacggacatctcaaggaatatcacttccatacacatagagaactggcgcagtcttcacacgctcaacgccgtggacatggagctctacaccggacttcaaaagctgaccatcaagaactcaggacttcggagcattcagcccagagcctttgccaagaacccccatttgcgttatataaacctgtcaagtaaccggctcaccacactctcgtggcagctcttccagacgctgagtcttcgggaattgcagttggagcagaactttttcaactgcagctgtgacatccgctggatgcagctctggcaggagcagggggaggccaagctcaacagccagaacctctactgcatcaacgctgatggctcccagcttcctctcttccgcatgaacatcagtcagtgtgaccttcctgagatcagcgtgagccacgtcaacctgaccgtacgagagggtgacaatgctgttatcacttgcaatggctctggatcaccccttcctgatgtggactggatagtcactgggctgcagtccatcaacactcaccagaccaatctgaactggaccaatgttcatgccatcaacttgacgctggtgaatgtgacgagtgaggacaatggcttcaccctgacgtgcattgcagagaacgtggtgggcatgagcaatgccagtgttgccctcactgtctactatcccccacgtgtggtgagcctggaggagcctgagctgcgcctggagcactgcatcgagtttgtggtgcgtggcaaccccccaccaacgctgcactggctgcacaatgggcagcctctgcgggagtccaagatcatccatgtggaatactaccaagagggagagatttccgagggctgcctgctcttcaacaagcccacccactacaacaatggcaactataccctcattgccaaaaacccactgggcacagccaaccagaccatcaatggccacttcctcaaggagccctttccagagagcacggataactttatcttgtttgacgaagtgagtcccacacctcctatcactgtgacccacaaaccagaagaagacacttttggggtatccatagcagttggacttgctgcttttgcctgtgtcctgttggtggttctcttcgtcatgatcaacaaatatggtcgacggtccaaatttggaatgaagggtcccgtggctgtcatcagtggtgaggaggactcagccagcccactgcaccacatcaaccacggcatcaccacgccctcgtcactggatgccgggcccgacactgtggtcattggcatgactcgcatccctgtcattgagaacccccagtacttccgtcagggacacaactgccacaagccggacacgtgggtcttttcaaacatagacaatcatgggatattaaacttgaaggacaatagagatcatctagtcccatcaactcactatatatatgaggaacctgaggtccagagtggggaagtgtcttacccaaggtcacatggtttcagagaaattatgttgaatccaataagccttcccggacattccaagcctcttaaccatggcatctatgttgaggatgtcaatgtttatttcagcaaaggacgtcatggcttttaaaaactccttttaagcctccttgttttgatgtcaccttggtaggctgggccctctgagaggttggaagctctaggcattgttctctttggatccagggatgctaagtagaaactgcatgagccaccagtgccccggcaccctttaacaccaccagatgggtgttttcccccatccaccactggcagggttgccccttccctccaatcatcactgtgctccttttttcccggcctacgaggcagctcctgccactatctttagagccaataaagagaattaaaaacctgtgcaccaggagcatcttttaaatacactagccattctcttgctttacaaaaacaacctaaccatcacaagaaagcctgatgaagtccagccgtgctccagcctcactttccctgcttggaagcgtggggtctcc

SEQ ID NO: 1057 - protein, 608 aa, Homo sapiens
MDVSLCPAKCSFWRIFLLGSVWLDYVGSVLACPANCVCSKTEINCRRPDDGNLFPLLEGQDSGNSNGNASINITDISRNITSIHIENWRSLHTLNAVDMELYTGLQKLTIKNSGLRSIQPRAFAKNPHLRYINLSSNRLTTLSWQLFQTLSLRELQLEQNFFNCSCDIRWMQLWQEQGEAKLNSQNLYCINADGSQLPLFRMNISQCDLPEISVSHVNLTVREGDNAVITCNGSGSPLPDVDWIVTGLQSINTHQTNLNWTNVHAINLTLVNVTSEDNGFTLTCIAENVVGMSNASVTVYYPPRVVSLEEPELRLEHCIEFVVRGNPPPTLHWLHNGQPLRESKIIHVEYYQEGEISEGCLLFNKPTHYNNGNYTLIAKNPLGTANQTINGHFLKEPFPESTDNFILFDEVSPTPPITVTHKPEEDTFGVSIAVGLAAFACVLLVVLFVMINKYGRRSKFGMKGPVAVISGEEDSDLHHINHGITTPSSLDAGPDTVVIGMTRIPVIENPQYFRQGHNCHKPDTWVFSNIDNHGILNLKDNRDHLVPSTHYIYEEPEVQSGEVSYPRSHGFREIMLNPISLPGHSKPLNHGIYVEDVNVYFSKGRHGF

SEQ ID NO: 1058 - DNA, 3713 bp, Homo sapiens
gcggcggctgctgcagctcctactgcatcttccttctcttcctttcctcgggctccggtctcggagtcggagagcgcgcctcgcttccagagcccccggacccggcgagtcagcgatcgccgagccggccaccatgcccggcagaccgcgccactaggcgctcctcgcggctcccacccggcggcggcggcggcggcggcggcgtccgcgatggtttcagacgctgaaggattttgcatctgatcgctcggcgtttcaaagaagcagcgatcggagatggatgtctctctttgcccagccaagtgtagtttctggcggattttcttgctgggaagcgtctggctggactatgtgggctccgtgctggcttgccctgcaaattgtgtctgcagcaagactgagatcaattgccggcggccggacgatgggaacctcttccccctcctggaagggcaggattcagggaacagcaatgggaacgccagtatcaacatcacggacatctcaaggaatatcacttccatacacatagagaactggcgcagtcttcacacgctcaacgccgtggacatggagctctacaccggacttcaaaagctgaccatcaagaactcaggacttcggagcattcagcccagagcctttgccaagaacccccatttgcgttatataaacctgtcaagtaaccggctcaccacactctcgtggcagctcttccagacgctgagtcttcgggaattgcagttggagcagaactttttcaactgcagctgtgacatccgctggatgcagctctggcaggagcagggggaggccaagctcaacagccagaacctctactgcatcaacgctgatggctcccagcttcctctcttccgcatgaacatcagtcagtgtgaccttcctgagatcagcgtgagccacgtcaacctgaccgtacgagagggtgacaatgctgttatcacttgcaatggctctggatcaccccttcctgatgtggactggatagtcactgggctgcagtccatcaacactcaccagaccaatctgaactggaccaatgttcatgccatcaacttgacgctggtgaatgtgacgagtgaggacaatggcttcaccctgacgtgcattgcagagaacgtggtgggcatgagcaatgccagtgttgccctcactgtctactatcccccacgtgtggtgagcctggaggagcctgagctgcgcctggagcactgcatcgagtttgtggtgcgtggcaaccccccaccaacgctgcactggctgcacaatgggcagcctctgcgggagtccaagatcatccatgtggaatactaccaagagggagagatttccgagggctgcctgctcttcaacaagcccacccactacaacaatggcaactataccctcattgccaaaaacccactgggcacagccaaccagaccatcaatggccacttcctcaaggagccctttccagagagcacggataactttatcttgtttgacgaagtgagtcccacacctcctatcactgtgacccacaaaccagaagaagacacttttggggtatccatagcagttggacttgctgcttttgcctgtgtcctgttggtggttctcttcgtcatgatcaacaaatatggtcgacggtccaaatttggaatgaagggtcccgtggctgtcatcagtggtgaggaggactcagccagcccactgcaccacatcaaccacggcatcaccacgccctcgtcactggatgccgggcccgacactgtggtcattggcatgactcgcatccctgtcattgagaacccccagtacttccgtcagggacacaactgccacaagccggacacgtatgtgcagcacattaagaggagagacatcgtgctgaagcgagaactgggtgagggagcctttggaaaggtcttcctggccgagtgctacaacctcagcccgaccaaggacaagatgcttgtggctgtgaaggccctgaaggatcccaccctggctgcccggaaggatttccagagggaggccgagctgctcaccaacctgcagcatgagcacattgtcaagttctatggagtgtgcggcgatggggaccccctcatcatggtctttgaatacatgaagcatggagacctgaataagttcctcagggcccatgggccagatgcaatgatccttgtggatggacagccacgccaggccaagggtgagctggggctctcccaaatgctccacattgccagtcagatcgcctcgggtatggtgtacctggcctcccagcactttgtgcaccgagacctggccaccaggaactgcctggttggagcgaatctgctagtgaagattggggacttcggcatgtccagagatgtctacagcacggattattacaggctctttaatccatctggaaatgatttttgtatatggtgtgaggtgggaggacacaccatgctccccattcgctggatgcctcctgaaagcatcatgtaccggaagttcactacagagagtgatgtatggagcttcggggtgatcctctgggagatcttcacctatggaaagcagccatggttccaactctcaaacacggaggtcattgagtgcattacccaaggtcgtgttttggagcggccccgagtctgccccaaagaggtgtacgatgtcatgctggggtgctggcagagggaaccacagcagcggttgaacatcaaggagatctacaaaatcctccatgctttggggaaggccaccccaatctacctggacattcttggctagtggtggctggtggtcatgaattcatactctgttgcctcctctctccctgcctcacatctcccttccacctcacaactccttccatccttgactgaagcgaacatcttcatataaactcaagtgcctgctacacatacaacactgaaaaaaggaaaaaaaaagaaagaaaaaaaaaccctgtaaggcagtttggcaaatatatatatatatatatatatttatatatctaactatctatcaatctatatctacagagagttaccttctctagtacacagagaagctgctgatacagaaaaccacaagactttaacaactcagaaactctaaaatattaataatacaaaggaaaattccctttgacttaagctgtggcccatgcttctaatgctacggctctttggagcagaagacctggaccatgcagagagacaatctttgggatgagagctctgggacgggaggagttaaggtggtgctcagtcgctgctgtgtgtgtctgttaccccggaagctcaccacaggcacatgtggggactgcatggctgtgctcagcaaagaaatgatgcctgagcagggtccttgcctccacttcttccccatttcctccacttcaggacaatgttctaatttgtccattctaaaaagtgtaatcttgatgcttttgggaatcaatgatggcacctacgggtaaacacagaacagacaaccccacaacacaaaaccatgacaagagctgacagcatccatcctgggtgtaagcttcttgctggagttgcaaaggatgtgtctttctattctcagaacttaaagaactggactttctggagtaaaagaaccacagaagaaaaaatagctgaaacctgaaccctgccaagacactgccacctgtcttttccatcattgcaaagattcct

SEQ ID NO: 1059 - protein, 835 aa, Homo sapiens
MDVSLCPAKCSFWRIFLLGSVWLDYVGSVLACPANCVCSKTEINCRRPDDGNLFPLLEGQDSGNSNGNASINITDISRNITSIHIENWRSLHTLNAVDMELYTGLQKLTIKNSGLRSIQPRAFAKNPHLRYINLSSNRLTTLSWQLFQTLSLRELQLEQNFFNCSCDIRWMQLWQEQGEAKLNSQNLYCINADGSQLPLFRMNISQCDLPEISVSHVNLTVREGDNAVITCNGSGSPLPDVDWIVTGLQSINTHQTNLNWTNVHAINLTLVNVTSEDNGFTLTCIAENVVGMSNASVTVYYPPRVVSLEEPELRLEHCIEFVVRGNPPPTLHWLHNGQPLRESKIIHVEYYQEGEISEGCLLFNKPTHYNNGNYTLIAKNPLGTANQTINGHFLKEPFPESTDNFILFDEVSPTPPITVTHKPEEDTFGVSIAVGLAAFACVLLVVLFVMINKYGRRSKFGMKGPVAVISGEEDSDLHHINHGITTPSSLDAGPDTVVIGMTRIPVIENPQYFRQGHNCHKPDTYVQHIKRRDIVLKRELGEGAFGKVFLAECYNLSPTKDKMLVAVKALKDPTLAARKDFQREAELLTNLQHEHIVKFYGVCGDGDPLIMVFEYMKHGDLNKFLRAHGPDAMILVDGQPRQAKGELGLSQMLHIASQIASGMVYLASQHFVHRDLATRNCLVGANLLVKIGDFGMSRDVYSTDYYRLFNPSGNDFCIWCEVGGHTMLPIRWMPPESIMYRKFTTESDVWSFGVILWEIFTYGKQPWFQLSNTEVIECITQGRVLERPRVCPKEVYDVMLGCWQREPQQRLNIKEIYKILHALGKATPIYLDILG

SEQ ID NO: 1060 - DNA, 3613 bp, Homo sapiens
tctcggagtcggagagcgcgcctcgcttccagagcccccggacccggcgagtcagcgatcgccgagccggccaccatgcccggcagaccgcgccactaggcgctcctcgcggctcccacccggcggcggcggcggcggcggcggcgtccgcgatggtttcagacgctgaaggattttgcatctgatcgctcggcgtttcaaagaagcagcgatcggagatggatgtctctctttgcccagccaagtgtagtttctggcggattttcttgctgggaagcgtctggctggactatgtgggctccgtgctggcttgccctgcaaattgtgtctgcagcaagactgagatcaattgccggcggccggacgatgggaacctcttccccctcctggaagggcaggattcagggaacagcaatgggaacgccagtatcaacatcacggacatctcaaggaatatcacttccatacacatagagaactggcgcagtcttcacacgctcaacgccgtggacatggagctctacaccggacttcaaaagctgaccatcaagaactcaggacttcggagcattcagcccagagcctttgccaagaacccccatttgcgttatataaacctgtcaagtaaccggctcaccacactctcgtggcagctcttccagacgctgagtcttcgggaattgcagttggagcagaactttttcaactgcagctgtgacatccgctggatgcagctctggcaggagcagggggaggccaagctcaacagccagaacctctactgcatcaacgctgatggctcccagcttcctctcttccgcatgaacatcagtcagtgtgaccttcctgagatcagcgtgagccacgtcaacctgaccgtacgagagggtgacaatgctgttatcacttgcaatggctctggatcaccccttcctgatgtggactggatagtcactgggctgcagtccatcaacactcaccagaccaatctgaactggaccaatgttcatgccatcaacttgacgctggtgaatgtgacgagtgaggacaatggcttcaccctgacgtgcattgcagagaacgtggtgggcatgagcaatgccagtgttgccctcactgtctactatcccccacgtgtggtgagcctggaggagcctgagctgcgcctggagcactgcatcgagtttgtggtgcgtggcaaccccccaccaacgctgcactggctgcacaatgggcagcctctgcgggagtccaagatcatccatgtggaatactaccaagagggagagatttccgagggctgcctgctcttcaacaagcccacccactacaacaatggcaactataccctcattgccaaaaacccactgggcacagccaaccagaccatcaatggccacttcctcaaggagccctttccagagagcacggataactttatcttgtttgacgaagtgagtcccacacctcctatcactgtgacccacaaaccagaagaagacacttttggggtatccatagcagttggacttgctgcttttgcctgtgtcctgttggtggttctcttcgtcatgatcaacaaatatggtcgacggtccaaatttggaatgaagggtcccgtggctgtcatcagtggtgaggaggactcagccagcccactgcaccacatcaaccacggcatcaccacgccctcgtcactggatgccgggcccgacactgtggtcattggcatgactcgcatccctgtcattgagaacccccagtacttccgtcagggacacaactgccacaagccggacacgtatgtgcagcacattaagaggagagacatcgtgctgaagcgagaactgggtgagggagcctttggaaaggtcttcctggccgagtgctacaacctcagcccgaccaaggacaagatgcttgtggctgtgaaggccctgaaggatcccaccctggctgcccggaaggatttccagagggaggccgagctgctcaccaacctgcagcatgagcacattgtcaagttctatggagtgtgcggcgatggggaccccctcatcatggtctttgaatacatgaagcatggagacctgaataagttcctcagggcccatgggccagatgcaatgatccttgtggatggacagccacgccaggccaagggtgagctggggctctcccaaatgctccacattgccagtcagatcgcctcgggtatggtgtacctggcctcccagcactttgtgcaccgagacctggccaccaggaactgcctggttggagcgaatctgctagtgaagattggggacttcggcatgtccagagatgtctacagcacggattattacagggtgggaggacacaccatgctccccattcgctggatgcctcctgaaagcatcatgtaccggaagttcactacagagagtgatgtatggagcttcggggtgatcctctgggagatcttcacctatggaaagcagccatggttccaactctcaaacacggaggtcattgagtgcattacccaaggtcgtgttttggagcggccccgagtctgccccaaagaggtgtacgatgtcatgctggggtgctggcagagggaaccacagcagcggttgaacatcaaggagatctacaaaatcctccatgctttggggaaggccaccccaatctacctggacattcttggctagtggtggctggtggtcatgaattcatactctgttgcctcctctctccctgcctcacatctcccttccacctcacaactccttccatccttgactgaagcgaacatcttcatataaactcaagtgcctgctacacatacaacactgaaaaaaggaaaaaaaaagaaagaaaaaaaaaccctgtaaggcagtttggcaaatatatatatatatatatatatttatatatctaactatctatcaatctatatctacagagagttaccttctctagtacacagagaagctgctgatacagaaaaccacaagactttaacaactcagaaactctaaaatattaataatacaaaggaaaattccctttgacttaagctgtggcccatgcttctaatgctacggctctttggagcagaagacctggaccatgcagagagacaatctttgggatgagagctctgggacgggaggagttaaggtggtgctcagtcgctgctgtgtgtgtctgttaccccggaagctcaccacaggcacatgtggggactgcatggctgtgctcagcaaagaaatgatgcctgagcagggtccttgcctccacttcttccccatttcctccacttcaggacaatgttctaatttgtccattctaaaaagtgtaatcttgatgcttttgggaatcaatgatggcacctacgggtaaacacagaacagacaaccccacaacacaaaaccatgacaagagctgacagcatccatcctgggtgtaagcttcttgctggagttgcaaaggatgtgtctttctattctcagaacttaaagaactggactttctggagtaaaagaaccacagaagaaaaaatagctgaaacctgaaccctgccaagacactgccacctgtcttttccatcattgcaaagattcct

SEQ ID NO: 1061 - protein, 821 aa, Homo sapiens; identical to SEQ ID NO: 1055

SEQ ID NO: 1062 - DNA, 109453 bp, Mus musculus
tgcagttctttcagacaggaacaattctgggtcagagtttttgactgtggggtagcaacccatccctccacttgattccctgtctttctactggaggtgggctctacaagttctctctccccactgtagggcattttatctaataacattttaaaataatcatttcctatttctaagtgtgtaggcagtgtcagttaccacctcataaatggttgactatgagggaatctaacacctgtacctcatggctgacactcatgagaactttgacgagtgatacctgtgtcttagcatcagaggtccttcaaggctagagtacacatctcacatctttagtgccctttctgatgcagggctcttgaaagatccaggttgtcagttactttccagtgcaccagtgagggttttgttttgttttttaaaattttttctctttccacctgtactggctagttttgtgtcaacttgacacagctggggttatcacagagaaaggagcttcagttgaggaaatgcctccatgagatccaactctaaggcattttctcaattagtgatcaagggggaaaggccccttgtgggtggtaccatctctgggctggtagtcttgggttctataagagagcaggctgagcaagccaggggaggcaagccagtaaagaacatccctccatggcctctgcatcggctcctgctttctgacctgcttgagttccagtcctacttccttggtgatgaacagcagtatggaagtgtaagccgaataaaccctttcctccccaacttgcttcttggtcatgatgtttgtgcaggaatagaaaccctgactaagacaccacctgaattgtaagtgcttcaataattcctacagtgctatctgtaattccttcagataggaatggtggtcttcctgggaattcgacagagctctgaaacagtacgttgactacatctgtcctcaataaattagtgcgcatcttccatgcctcccaggacagaccagctttcaatttgtatgtaatgggtgcagtaaaaaaaacaaaaaaaccaaaaaacccaaaacaataacaagaaaagaccttctgaaatgactgctacattaaggggaaggtttttactatgaataagagaaagacagagagagaaggagagagagagagagagagagaaagagagagagagagagagagagactgtggagtgtgttttagactctgagggttagctaggtccgggtgatatgatgtctcccaaatgaggcccttgataacctcagagtcagaatgaaaatgtggttgttgggagttgaacctgggtcccctggaagagcagtcaatgctcttaactgcggagccctctctccagccttccctccaaccaaacaagtaattttttatctcttgaactaatatatatataaataaataaatatataaaaataaatatatatatttatttcagtagaccactaatctagacattttaagcaaacacaaagcaaaggcatcttgggcccttgttaggaacttaagtaactattacttaagtaagtaactcaaaagctatttttttttaaaatttttttagatttatttatttattatatgtaagtacactgtagctgtcttcagacactccagaagagggagtcagatcttgttacggatggttgtgagccaccatgtggttgctgggatttgaactccggaccttcggaagagcagtcaggtgctcttacccactgagccatctcaccagccctcaaaagctattctatatgtcgtaaaataacatgatgcctaaaagcaagactctacaggccactgtagagcccagatccaaagcctagaccagaacaggccttgatatgctaatgagctaaccccaagtggtgttgatgaagtgaaccagcctcaagctgtgagccctgatagtacaaagctttcacccaatgaagtgatacacaaataagaacttggggatggtttctaggaccacattgctgtgctctcagacatggtttctccagcctctgtgttgtccatctgctagaagacttgagactctgtgtatggccctgacctcagtgaccattgaacttcctgcactgttgctgggcccacacaggctgacctgttagcactgggcctatgctcccaaggacctcctgagcatccgtcagtgccatcctcccagcccgccacagctgaaggacttcatggtagatgtaggttcagtcggcacgttaccaaatcgtcctcagtcctcatgggagattccccatggggaaacctgcagtagcatttctcacttgatgtccctcacttgatgagatgtctgtttaacttttatgtcagcaagatattataaggagtgtttgtgtgaataaaccaagcatatttgaaaagacaaatcctgggcggacatcctgattgctgggagctttacagcccacaggcagtgctctctgcagctctccttgtgtcaagctcggggaatcagaatctatatgcttctaagctcaggcgtctctctggagagtctttcaggcacccagaacagctcagtggcctctgagtatggcataatcagctctgagcaacctcacccttctgacagctgttatgtttaacatcctagaggaatgaagctagcttgaatggctctccagggcaagtgtctcttgtccaacgaaggcagcttccagaaggacatggaggaggcaacttgtgtctagtctgtcactggggaaaaccctcttaacctctgggctacaggtaataaatagcaagtcaattctctgtccaaccaggaagcaagggtagaaaaattaggccctttgggccactgtcttatctccaaattcctactggatttctttagactggcagggcttactataggtgataaaaaaacaacagacgcttgcaggaaggaagcaggtggggtggggtgactttgactaggggtttggagagggcatgcaacattgcagcctgtttcctccttggaaaacaagaaatgttcattaagtagactctaagttctgagaggaggtttcagccccaggaacaggaatgcatctaagatccaagagatgggttaagctttatggagacacacacacacacacacacacacacacacacacacacacacacacacacacacttgaaacagggtcacatgtattccagctggccttgaacttgctatgacgttaaggaagaccttaaacttcagatcttcctgcctttaacttggagtgctgaggttatagggatgcacaccccctcctcagcccccttgtgtgtagggctcaagccttgagcttcttcaccccaggaaaacatactctcaagtgaactttatctccaacctcgatagataccttgtttccatctttgctttgactgctaggaggctcacggccacaatcctagttgatctttagtagctaagtccttctagcaggtggtgggaagggtgggggtgggcaggcctatgggggtgtttatggggaaggctcctggcatgcctcaagtctttgctctgtctctccagctccgatgtccttgtctgccattatttttctgtttatatgataagtgtttgcttagtgcattgtaggaggttttgaaaatgatgtcaggttgctttggcataagcaatctcacccccatcagggagaggcagtgatgtcacagtcataccccattgtcctcacttcttgatcatcatcttaggaaggtcaagtcccctctttgagcctcttttctttctctgtaagatggttgtactgctgcgccctaagtcctgcctgcccagggcatgtgggactgttccacgagatacagggtgcaggaaggtgatagcatttacaagacttccccagctgccgtttgaggacatgctgggtgagcagaggtggggggtggaacttctgggtaggacaggaatgagtgcatgttggatgtaggctgcagcagcatggtgtgagagatgaaggaagtgtgaagagagtgaggtggataggaggctgtgcaggagctggagaagaaggcaccagctttctatgtgggaccagaatcagaggcgaggactcttagtggtcccttctgcttgggtgagaaaggtccctttgtccctggcccttgagacacagggcagactatatcaaccagagccccttggcagagtccaggctgtttgcctggggatgcactagaagccatggagatcactttgtgaaagagtgcttcctcctgctctgcccctgcttgcttctcctggaggctgacactgtcctattagaaccaccagcatggtggccttcaagtcagtgaagaacatgtgcttgtctaactgtccaccaagataagcttgtgttagtcatttgtgctgtgatttactatatgacaacatgtgcgcgcacgcgcacacacacacacacacacacacacacacacacacacacacacacacacctctgtagctctctggcctggggctgtaatgaggaagcaggaaataaaactgaaatgatccctccactcaaagaactcacccagtgtcagtgagcttagtggaggccatccactgtggtttgtcagtcagcgagcttagcagaggccattctctgtggtttgccccttcactggccacacataagaatcccattatggccctgctgccctttagctcggggacaccaatggcacttttattgactttgttttggcttagtgttgtgaacctgtcactgccccatacacatttaaagctccccttttgttccaagttccttgggggtgacagtgtttgttgtgttctttcaatgccacctgccaaacccactgacaaaggctgtgtgagaacatgtatggtagcagttgttgagcaaatcagtggttctgagccattgcactgagctctgcaggaagcagtaatctggggtagagaggcctggtccaggcttctgggtcccaagggacacaccttagctgatttggtggcccaatatgccaccttggcatagtgggcaacaaattatgagtcctccctctttctctctccttctctccttcctttcttacctctttccctctctctccctcttttccttcctctctatttttccttccccctctctccctctccctctccccctccccctcccccctcccctcccctcctcctcctcctcctcctccttcttcttcttctcttcttctcctccttctccttctcttttccttctctcctcctcctccttcttttcttctctctctctctcttccctctctctctcttcctatcttctttccagacactgtttccatgaagctcaagatgtctttaaacttgctgtgtggttaagaccttgagtttatttatgatctacctacctcaggtgctgaaaggccaggtgtgtgcttccacatttggtttttgatgttctaggactggaatccatggcttcatatatgccagacttcatatatacaaatactctaccagccccagccctgccccctcttttttttttagggctttccttttagatgggatctttggggttgttcaacaggacctactcagctagcagctcacaaggttgcctttgtccttagagaagctgacacaaatgaactctgtacagctagagaagtcacggctgagataaggccctgcctgcccagagcctactagggccctgctggggctggagtctcaggacagctcaggactgggttccctcatgttttccttctgagcagccacagcatttccaacattgctccctgaccctttgtcacatggtttcttgtcttacccttctacctctatggcttcctggacttgaaaggtacaaaccccttatcaaagacgagaaaggtgaatgtgtaggacctccttccagatctcaggaaagggaaggccagtcttctggaagcccgaggacaggaagatggtgattcccatgcactgggagcagccttagatgaagcaaccccacaatgatcctaacccaacattttacccatgtgaggtaaagaggcaccgtcattcacaagccttggataagaagtcatagctgaacagtggtggtgcaggcctttaatcccagcacttgggaggcagaggcaggtggatttctgagttcaagtctagcctggtctatggagtgagttccaggacagcctcggctatatagagaaatcctgtcttgaaaaacagaagaagaagaagaagaagaagaagaagaagaagaagaagaagaagaagaagaagaagaagaagaagaagaagaagaagaagaagaggaagaaggaggggagggggagggggagggggaaggggaggagaagaagaaaagaagtagtcagcctgctgctccaggctgactggacacatggtctctgcttgagacagccatggagttcagtctttatgaagagccactgaggtggccacaagtgtgtttaggaaggtgtggaggtatagaaccaggataggctgtcggaaggaggctggctctcggttgggatatggtcctttagaatggcctatgctactcatctctgacgttcacagatgatatggatgtgctaaaccagagcctggtacttgtccagaggccaggccttgattctgaacctgtatcactcttgcctctttttttgtttaaatatccatgggtttatgatatggaggggagagaaactgaaaatctctttgtttaccaaataaaaattggctctttgtgttgatctcagaagagaaatgtatttgaccatttgcaggtttgtagagtgtagttagaagaaggaaggtcctatggcctgaagcatgggtctcagtaaaaggcttcagctctctgactttctgtccccccacaccccgactttttctttcttgagctttgtccctcagtcatactgccgcaccccagccttgcccacattagagaccatagcctgctggaccgatgcccatcttggcctaggcccctgcttctttttccttggctttggcgtgtatgtggggaagtctccacaccttgttttatttcccctgtacctactcctagcaccagctcctgtctcccagcctcacctgtgttcactatagtttcaaacattctgtttccaccttccagacaaaagccctggaatcccagaacttgggtgggtgcgggccccttatgtgtagcccaatcctagctgccactggctgcttgtcagtgagtgcttcagttcacctttgacccaggacctcctctcctggtcagaactgtaggacagtttttcacaaggtgaaggtagcctgaaagttgcaaaggacttgagagcaaggctgctggagagatgtgggggtccatggaatattgactgtcagtaaagctacagactagatggaccatgaggagaaagaagagcagtggatgggacagggcctgggggacacatgtcctccaaactcctttccttttgagcttcctctcacctaggtgtcatcaatgactgttatcaatgactcaaagcccatttgggggtcattctgggctcttgtatttgccatgcacatatttccctaacataactgcaatctgtggagtttcctatgctcactgactctgcctggtgattggagttaaggctcatgacttgtttgtccgtgtgtccccagatgtaaagcaaatctgacacattgacaatgttctttgtgtgttctggcatgcagacattctctacattgagttaggttctgaactcatgaatgacccgttgaaacatatcacaaggccctatcagacagccttggcttttatactacaagctcttagcagatacatgaagtccagagcccactcatcaaaagccaggggttcaatgcagaaatgctcaaggtagggtggtccatttaagaggaaaatggtcttccttcttttagggcccaagacccatctacgttttggggtagcctctgctgggcttgcagtcaatcttgatgaagattgccacccagcattgccttgccatgttcttcctggtgtacaccataccatccctaccctccaagaattgtgcagctaagttttagacgctaggatagatctgacttggggtacacttgatctcattctaccctatcactgacttctatctttttagatggtggtgggtgctggtggcatctttgtttcctcttcatctttcctttgagttcacagatccaggtagagactgaagggaaaaggggaccctccagctgggcatctttaatgggctccaacatcagtccatctgggccataaactttctgatggaagagatgagctctccttttctgtccaaagaccaatggatgccactgtctaacccaagtggaatacaacaggaatccttaggtgacctgagtagattcatctcgtgctctgtgaccatgcccatgcgtgctctggcttggaggtggtctagtaaattctcctatgactccaacacacctgggaccatatgtccgtgatttggaggggcagttgtgacgccaagcacttagaggtgcctagaccagttctttgtgcagaaactgcctgaggaggtccatggaagtcgccctttatctggataagagttacccttggatgccattcagtttccttgttcttattctttgctccgaaacaaactattaggatatattttagtctttcacacagactcattctaaagccaaaacacacttccattgtcaatgactgacttggtttcctggtgtaccaatagtatctgagcagtgtaattaatgcagttggacgtctgaggatcaagttttacttcaaagtctgccatgggtgatggtgcaatcctgtgaaggaggacctctctgaaagagctgtccccactgtctgaggaccctggtctgcacagaagccaaatctggaatgtagcttgtttttggatgaaattagaggcagagtctcagtccctaaagatgacttcacagcatcccactagaatcaagtgacagagactgtgggttaacagggcaaggtaaaggaggcaaggtactccaaggtcttatgtggcaagaccctactcaccaggccagaaaacagtcaattctgctgagctggctgcttcttaccagctcattccaccacagagactatcttacaaatgtcaagtaaccttctcagagtcttcatcgggtctatcggaatcctggaacgcaaactggagtgtcccaaagagtttgggaacatttacttcataaacccaaggaggagaattagaacctaagacagaaacaaggggcaagttccatggctttcccaaaatctaagcatcataccgtgtgcttgccgaggacaagaaatggaagcaaggtaagatggttggggagtggtttggtttaaggccagggatttctcagctgagatgaagatgttgggggatcatctggtagaagttgggatgggtgcatggtctgagtgaaccagttcttcatgtcttctacttttagtcagtgtgcaagggcattctcagtcctctgagccttggtgataccctcaagagctaactaggaggacagcatgccagtataaaccatcctgaacatatgccttccccttggcaccatgtctcttatttgcccagcagcccacatcctgcttcccataagttgcttggactctccaagataaaaatcaaggccatgttcagggagccactgggagtcttctatgctcatcaagaaggaaattttatcactgaagtcaggccttctacattgggcaacagccagtttgttcctaccacaatcagtcaaacacacctaaccttgttcccacggattagtcaaactgttaacaaagttccccacttccgtcatattgatttatagtagcaatagaagcacaccacccaagagggcacacctctttccacccaggaacttataaatgtcaaggaatttctactcaaatcgagaggaaccggcacaatggggatctccactgttatctttgaaatatgtcttttgtggggtcaaattctgtctacaggtatttcgtctcatttatttatagtcatgaattgtgcttctgcaaatctcagtcctggtgggttggatgaatttgttcatggttgtgtgactgtccgtctcaaggaggctctttgctaataactgtaaatatttgtaagtgtgtggaggcgtgtgctttcctttttgccccatgtctgcctgagagatagaagaggcggcggcagggaagaagccaggcattctgttggtgttctcagggagtcgttcggtgaaggaaatgattgactgaagtccccaggctcaggaaaggcttatgggaattagggagaggccttgctaaatacataggtccggtgctgtgaaactggaaggagatgagcttgtattggtgttctgcatgtgccttcttttccgtatgtctggctctctgaccattatttgctgagcaaagccaggtcaagggaccaacagacaggatggtgttagtgtgccagtcacactgcttgcagctcagtcactccaacactgtgtcaagtgatgatcagggaagacttacctggtcactcctccatatggctgaatgtgtcatctcacagaggacaccctgtgtaacccatctctttctctctggctgtatgtcctccctctgtctgtctctttctgtctctctgtttttctgtttgtccttctctttgctctgcctctctgtatctctgtctctttctgtctgtctctttctctgtctctttgtttctgtctctgcctctctcctctctacctttccctttcctggatatcctatctctcatctctttcacccagttctttttttctttcctccctctttccctccctcctctttcccttcctctttttcttcccttcctcttctctttatttcttcttcacacaccctgttcttttctttctccctttggagcctctatggctaggtttcttaggcaagattatcagatgaattccagaatgctcactctccccaggctgggtgagatgaagactcatttggggcatggctttcacgagaacatcaccccaagaccaaatcctcaggcgtgcactgctgaccaaggggtcctagactgaggcagccaagaactagtcaggctgtctgtcttcttggagagtgtgaaatgggaggcaaggccagctttcagggtgacagacttgctctgtccttgcccagtgacctggaatcaccatagtccttggggggagacagccgtgcccttatccacaaagaaacaaaggcagtagtgctatggggctgagggagtttgtccttttaacatgatgctacatgtgtgcttacatacaaatatgcatgctggccctacatgtgtgcttacatacaggtatgcatgctgtggcttcagcacacagagggggaactgaccctcttccacttgagcttcttctctaattcaagccaggaaacaccccaaagttaggcaccatagttcagatgagggacacaaagactcaggagattggctatatgggagctgggctagaatttgaacctggagtaaggcctgatggcactgaagtgacagctacgtcagattaagccatggctgctccaggcagggagcagagggagctgcatgtctgacctcagtgtcatctttgtacagagtcaggtgcacaggtcatgctgggcaggagagaggctgaggcactgctgttggtcaatggcagagccaaggacactgttgggacagaccctctcctgcagtaaaacccagtttacccctttgcaaatggggtggcatgctcttttctacagagtaagggaatgagacacctcccaccggccaccccgtcggactagcaggtagaataagtcttacgatggtcatgccccatttggagcaattttctaatgttttatccacatgtgacttccttagggtagtttgggtctcggagtatctctaggaagacaggacttgggagcaattcgaacattaaccacatcctcaccattcctgagcaatcatctctccgtttccaaagaaaatgggttctaggaacttccttgcttctacccaaagcatctagcactcaagtcttttgtcaactggtgtgtgacccacagacatccttctgtgtccttccagatctagcccctcatagaatatcagccttgtgtgactcagtgctataccacattgctcatgtgaggacggcaagagggaaggttttcatgttcaataatacaggagcaggcttttttttctttatatttttgattcaccacctgtgtaatttgtgaaggagcccatgggtacgtagggccaactggaatatactaagattattttattgttttgaccatgaaaatggaaccttggtgtttgagtttgggctttgagggacccacacagcaaaggtgtaaaagctatgtctttaggagttggtgaaggtgacttcaggtgttcctggtatgtcgttgcttccaaggaaggtttttgcccggattcctgtacataaaacacagaacctgaatttgcttttatttctttcacagcatctcaaacagctgttcccacagatggtaagtactttgaaaatatggacctgtatcagtgtatgatttcccccaatgtcgtgatagacactgcctcaataaatggtaataaatgacactaggatgaaatatatagtgttccatgtagacggtaatgacaatagaaactcctgccagctagagcataaaggaccctgtgttaagacaattgcagtgttcatttttatgttgctcctgcctcatattacattttatgttagaagcgaatagaatatctaaatgcaggccttggattcggtcctggtgcaagaagttctgactaggagacatgaagcaaactcagggatcagtggttggcagatgatatataagaataacttgccttcttcatacttggaccaactcctgcttgaactaagacgaatcagaatctgatgttaacaagattataggaccatttgcttgccattggtttatttactctattttgagacccacctagcccaggctaacctcagacatgctatgaaggcaatgttacccttgaactcatgatcttcttgcctggagtttccaggttgtaagaatctagaattgtgtcaccatcccccaactcttgtcacatttgaaatgacataaaattcacctccaactccctggcttttatctccttttgcaaaaaaaaattatttatcaagaccttgggtagtgcacatagacaaaactgaaacattgatccccccacccccaactcccaggggaatgagtgcattcgaggctaaccttgtaccctgtatgagactatatctaagaggtggattcaattctaagctgagctttgtcttttttaaggttggtggacccagggagtgtaggggacaaataaccataaggccttcttcttcgctcttgtttctggctttgggctactgatggaataggggttggatctgcttcctgttgctgggatcacacacaggctctaagcaacttggaggagggaaggtctctttggcttacaggtcaccatccatcattgagtgaagccagggcaggacctggaggcaggaactgaagcagaggccatggaggagccctgtttgctggctttctgacacatgcttagctagtgtcttatacagcacaggctcacctgcccaaggacagtgggctgcccttgccctgacaattatccatcaaaccaatccacacagacagggccacaggcaattctgatctgggcaactcccagattgagagtcctttacttgacttagttggagctatgttgacagtggagataacgaggacaaatggccagcattgctgctgctgcttggggagaacccaacaaaattgttgggcacagaagtcaggggtggagtagagaggagagatgtgggtatcaagctgttgggtataccccaccaatccccacccttccccttcactcttctctctgccctcagtcacgtgatgggtgaacttggctttagcctcctgtctgtagggctagtgaaaaacagtcactgtttctttcttccaaaattaaatattgcacataatcaatgctcagatattataggtaatatgtgctattatcaaaataccttcttggcaggaactccagggaaagctttttgaccaactcccagaaaggaacaaaccaaggctggcaattctctagtgggaccaatcagagagtgaccagcagagggtagtaagtttgcgtcctgcagacacagggccttctttgggaacaccttggaaggttcaggtttcctttgccaatccccatagcaccctctgaagatctccaacaacagtaactgtctgatcctcttaccttgtctccacttcctctcactctcagatctcagagttctcacaaccacaaaggagccaccgaagggtacactcagaatgggctcctgctgtcaggatgcagaacctgtttttttcctgctatcacatagctgctgtctgtttcctctcacaacacagcacagatataattgtgagagacataaggccagcactccacacagaagcatgctgcctgaccagtcatgtgcattcttacagtgcgagagtagactggagggctggagagaagactgctgttagatggactccattgtaaccttgaccctgatgaagatggagtggatgcagaagcacccttgtgggtgtatgagtgtgtgtgtgtgtgtgtgtgtgtgtgtgtgtgtgagagagagagagagagagagagagagagagagagacagagagacagagagagagacagagacagagacagagagacagagacagagtctcaccatgtagccctggctggaattcctcatgcagaccatgtagaccttgatttgcataaacctacctgattgtgtcccagtagtgcagggattaaaggtgtgagccatcattcctggactttgagaaagcagtttgggacagggaagtaactaaaatatataggtgttttttcaaaataaaacttaaggagcagccactggtcatgggtgggtcgtcgggacagccctgggcatgacttcagagactatgggcaggtctgtgataagcagcattagataagagctagacagaggcaaagttgagtggagatgtcacagagaggtcacagagcagggcaggttggagaggaaagaggtacagcctagtgggtgagccttagtgagagctgagagtgaaggtggaaagaaacagacatcaaatgtgatgtccaagttccagcacacttgtggctgtgcatggtagcatcaaagatcccaatgaaatactgagtttagagtggttgacatggatatcctggatactgatggagtgatatccagtgtgagtctggagttctacactgggactgtcagggctaaataaggactaaagaggtgaccttgagagacccttgtctaggatgtttccagaggatatggggaagaggatactaggaagacgatgtagaaagtaaccttttggctcctagggtggggaatgacaagtaagacagccctgcaggccaggggaggagagggtacatggtggtgctggcacaggacacagaagccacagagcccagcatgccaagagagcagttcccgctgtgtcaatgcaggtttgtctctgaggctggtgaatggcagtgaccgctgtcagggccgggtggaggtcctgtaccaaggctcctggggcaccgtgtgtgatgacagctgggacacccaggatgcagatgtcgtctgtcaacagctcggctgtggccattctgtgtcagcaccaggaggggcccattttggagagggctcagggaacattctcttgggagctgtgcactgctcaggatgggagtcctacctgtccagctgtcaacatgacgggtggtacaaccatgactgtggccacagggaagacgccggagttgtatgctcaggtagtgttgttgtgacctctagatgttgcactatatgcctaggcaacattgtgattgtgtgtgtgcacacatgtctgcctgtgtgtgcatgtgtgtgtatgcatgtactcacacagcttgagtgtgcttctgctatgagtcataccttatttaatgtcagaggctctatatcgcagtctctgttcatagatgatgacattgagtgctgagaagtcccaaactgggaggtggtgaagacagatttttagcttctgtctcatcagagctcactgacaccatcactcagtgatgactgggaccaagattatccttgaccctgaagaggataaggcgactgctggtccttaccacctaattgtataaagcaaacgcaaagcaatgagtggcccatatgtcctctctattggagattacatgataaacagaaatacaccatcttgagggcgacaaattctccctaatcctaatcctaattgattatatgatgctggtatccattcaaataaaggcagcttttaatctacaaagaaggcacccagggttgcagtccattgtatgtagccaagaagatttctagttcaaccactggtaggcagtttttatatcctggactgtgcgcatgtcacaggaaacaaagagtgaccgagtggatcacagcccacctgagaatggcacttattctcaggaccatggtcctgccagcagccacactgtgagaggctctatctgcccttccagaataatccctggaagtcacctcttttgttagttagagccactttctcaggattgtttcagcaatggcaaatgtttataatgagaggttatgtctgggttcctcaaggtaggaccaacacccagtgaactctttctcattctgcagaagtgtcctatacagctgaacaaagcacagaaggtaagttgtagtaggttgtatccctgtggcctattgtccccagaacccccagactcacctcctatcagaagatgggcagaaggaagagcatgtggagtccttagcaaccagggaaatttcccagtaaggtcaggcctatagcggcgtatatgccatggattatggccctgagttgtgcaggttggggaggatcagccagaggaggcaccttcaagggtcaccaaggacttcttttttgtagggattccattgaccagtctcagtgccccgaggtccccatgtttcatccacaccttggccagtctagggagcagaatttataacttcagtgcctggagaggaaatcaaaactctgcttagccaatgcccttgtcatttcctttcatctaaggccttataaagctactctggatgcctgaatcaccaacaagggacattaaatatccggttccatctctttgagttcctccaatgagtggtgttggtggcacatcagtacagtttagacgctgatggcctgggctttgggaaagaaaatccctttcttctctccttggcattcttttgatcctaggacactgcaagaactgtttccatagcagtgtctctggccagcccagggtttgtagggaatccaattggcccagtgtcaggcatcacttttccttaggaatatgaggtgtcccaaagatgaggctggctttactctcactaaagccatattccttcccaagattccacccagtttatatcaggagctgctgtgtaggggagaggtcaattctttctgtatcctgagacctttgaaggttatgcagagctggttgctgggtgccagtgggttaatgtcttgatatcatcactccaatccccagtaccaagtatactcttgaaggcactgtgtctgagagccagggctcttttaaagtaatttaaacatatgtttgaaatttgtctctcatttaaagaggacagattagagtaatttccaaaacagtaaaaaaaatgagcatgtccacacacacatatacacaaccacacacacatacataacacacacaacagcacatagacaacacacacacacacagctgagagtgtaggatgacatacaatattctaccactcatgatgctgagctagtaggttgttgagtttcagtgtagcctagggtacatgaggcagtcatgtgatccaggacagtaggggacaggcagctcattcaggtttataattttgtattaggcctgaaagcaattctaatgtaaactgtcaaccatgtgtatgtaagcagctgttgagagcctttgccatgcactcttttgacggtaggatcatctttaagcccctttggtctattttagaccaacctgctctgccttctcatttactgctgacaggtatggctcaaggtagagagtaatgtgtgcaggtccagtgtgtgaggagttgggaggggtttgcaatctctctctccttgaaatagtcttgattctacagtacacggccctccaagtacctccaagccataggtacaaggtagagtaagtttcttgtcactattcaaggcagattcaacctatgccaacacagtttgcagaaacttattcacccgggtgaccaacttggtcctcatgtctaggacagaagtagagagcattgtagtgaaggttcacaggcaaagtgagagggtacagatctttacaggtcagtgtggccaggatgcagcagcaggagctgttcatgtcctatattgctttaaagttcatgagtgagctgccaccaagtgtacaagtgagacatgaccaacaatggagaaaccaccatgtctttccaggaacagattctggtttggccgtgaggctggtgaatggaggagacaggtgtcagggtcgagtggagatcctttaccagggttcctggggcactgtgtgtgacgacagctgggacctcaatgatgccaacgtggtgtgcaggcagctgggctgtggcttggccgtgtctgccccgggaaatgccaggtttggacagggctcagggcccattgtcatggatgacgtggcctgtggaggctatgaggactatctgtggagatgttcccaccgaggctggctctctcataactgtggacaccaggaagatgctggagtcatctgttcaggtaagacccagtgatcattacatctgcctgacagcaatgagctcaggtcactatgaatgctgtcagaactccattctggccacttcattggtccttgtaaggactggtgactatccaggacaatgcctttctcagtcattgtcctgcacaaggctctcagtctctagtgagtgtagagtttctgtgagagaggtaagcaatggaaatgcaatgtcaagtcttacccatgagtaaggtcaaaggtcagcatacatgtgctcttgcaaaaggtaatccagctttggtctggagtattggaatcctgtttctatgctgaatttgaactatcagaagggcaaagctgtaccgaatagcaaggtgagcaaattcactcttctttttccatagtgttccccagaatccttcccagaaagtcttgctgaaggactcttctggggaagcttcagtaactccttcagtccctcagggtctgcagagtcctgggttctcacagatcgggttcaatagctcaatcatgataacacactgggaatgttattcatgaatgttggtggtgtggacatggcagttaggtcctatgtagtatgttcatgaggtaaattgacaaatatttggacatggatatagcagagaggattgctagagtcctacagaatcctttaactgtgaaggtggatctttgaatcttcaacaagtcaaggctgactgtgttgttggcccattacccacacagtaacatagaaccctggtttcctgtcatgtctgcaggtggtcatggttttttacttgctattattaaactgcataaaaccgggtccacctggggcatggagtacatggtagaagtacatgagtagctgtattactcatggtctgctttggcaacccccaccttggagcatcagcctcagctacatctgtagaaatgctgagtctgtcttccctgggagtccaggtgaaattcaggtgctttctatcaagtgtccttctatttctcaaagatgtctgtgcctccccttgctcaggtcaatgtcgacagcttggagtcccctcttctcctgttcatttcagggtcatgctttttcttctgacactagggaattattgataagacacacattgctcactccctctagttttcaccaaatatgttacctgggtcatcagctttgctctttgcacattcatggctgacacaacatgtctggtatgttttatacacacatcactgggcatcatagaccccactgctgcatgctactcagaatggatggcctgaggctttgcatggtgctaacctcaattgggcgggctggtacctcagagtaccacactgtgtcctgatgctcttagagtagcttcctctgcatctggacatctgaatgtttcaattcctcatgttctttcctgttttctacattgattatcttactgataaataagtttatcagtatattagtatatgtataacccaggctgctgtccttgagctatgaattccccatcttcatttcccagtgctgggattacttcaatgagccctggtacccagcatacatcctggtttcatttcttcttatacagggtactgcagttcactcagtctaccctagtgtgcttgccataaccatgttccaacaccaccccctatagcctcaggcagctcactgcagatgctatggtgtcctggagcaggtcgcctttgtcctgtccctcaccagactccacttggtttgttctaactgttctttctaaattctaggggcactgtcaccttcagaagtccctacctggtttatacttttaaagacacacacacacacacacacacacacacacacacacacacacacactcagacagaaacagacaaacgatacacacatacatatacttggatggacagagacacacaaacatacatagtgataaatacacagacacagaaacacacacatatagtctcacatgcaaaggaaatgggttccaagaacttctttgcttctacccaaagcatacgacactcaagtcttttatcaactggtgtgtgacccacagacgccctcctgtgtccttccaggcatcccagatctagtccctcatagaatatcagccttgtgtgactcagtgctgttccacattgctcatgtgaatatggcaagagggaaaggttttcatgctcaataatacaggggcaggctgcttttctttaatatttatgatttaccacttatgtaatttgtgaagaagcctatgggtacagagggccaactggaatattacaaagattatcttgctcttttgaccaatgaaaaaggtatttaagttttgtctttggggtgaagcccacaaagaataggtgtagaaactatccctttagaaaggatttttgccaggatccttgtggtcgaaacacacactctgaatttgtttttattcctttcacagattctcaaacaagcagtcccacacctggtaagtacattgaaaatatagacttgtatcagtgtataacttcctcctatattgtgatagaggctggcccactatatagtaataaatgacagtaggatgaaatatatagtgtcccatctagacagtaatgacaatagaaactcctgccagctatagcaaaaaaggccctgtgctaagacagttatagtcttcaattttatgttgccctggtctcaattttcagttgatgttagaatcgagtagaatatctggatgtaggtcttggattcagtccttctgcaagaagctctgactaggagacatgaagaagactcagggatctgtggtcggcagatgatatgtaaggatatcatgccctcttcacacttgggccaactctggcttgtcccaagccgaatcagaatttaatgttagcaaggttgtagggccacttgtttgctattggtttgtttatttacttctttttgagacccacagagcccaggctaacttcagacttgctgatttggcaagggtccccttgaactcctgatcctcttgtctgtagtttccgagttctaggattccaaaatgttgccaccatgtccagctgttttttttttttttttaccacattggacatgatgtgtagttcacctctatgcctagaccttgggcatagccaaactgaaacactgattcccacccccacccccaacctctcagaaggcatggctgtgtagtgcagttcaggctaagtgtatcttgtatgagaccatctctacatggtggatccaattctaaactaagctttttctttattaaggctggtggaatccaggagggacaaataacggtaaggccatctccttcactcttgtttctgtctttgggttactgatagaatggggagagattctgagtcctgttgctgtgatcacacactggccctaagcaacttggaggaggacaggtccgttgggcttacaggtcaccacccatcactgagtgaagccaaggccagttcctgaggttccagctggaggcaggaactgaagcagaggccttggagcagcccagcttactgactttctggctcatgcttagctagcgtcttatacagcgcaggctcacattgcccaaggacaatgggctggatttctctgacagttatcgatcaagaaaatccatacagacagggctatagtcaatcctgttctgggtaactcccagattgagagacctgtacatgacttagctggggttctgttgacaatggagataacgaggacaaatggccagcgctgctgctgctgctgctgctgctgctgtggctcctgctgctgctgttgctgttgctcctgctgctgctggtggtagtattcctgctggtgctagtgatgcatctgctgtctggaggaatccaactgaatcggtggacacagaaatcagggatggagtagagatgagagacatgggtgtcacactgctgggtagaccctaccaagcccctcctttcctcttcattcttctctctgctcttcagttatgtgatggatgaaattaactttagcctcctgtctgtaggactaatgaaaaacagtcactgattcttccttccaaaattaaaaatattgcacatcatcaatgctcagctatcacaggtagtatgtactttaacagaacatacacatgtcggggaatccagaaggaaggtttttgaccaacttctagaaagggccaaaccaaggccggcagttctctagggggaaacaatcgagagtgaccagcagagggcagtaacattgtgtcctgcagacctgtgccttctttgggaacaccttggaagtttcaggtgtcctttgccaatccccatagcaccctctgaagatctgcaacaacagcaactgtctgatcctcttaccttgtctccacttcctctcactctcagaccacagagttctcacaacaacagaggagccactgaagggtacacccaggattggctcctcctgtcaggaggctgaacctgttctttcctgctaccacacagctgctgtctgtttcctctcacaacacagcacagattcatgtgtgagagacttagagccagccctccacacagaagcctgctgcctgcccagtcatgtgcatccttacagtgggagagcaggctggagggctggagagaagactgctgttagacggactccattgtaaccttgaccctgatgaagatggagtggatgcagaagcactgtgtgtgtgtgtatgtgtgagagagagagagacagagacagagacagagagagcatatgtgtgtgtgtgtgtgtgtgtgtgtgtgtgtgtgtgtgcatgtgttcccatatcaattgctggtttaaccagataaacaatgtcacaggaaacagtgtgactgtggtgatcaccacccacctgagaatgacccttaaaaggaacatggccctgccaacagccacacttgactatttattctgtccttccacagtaatctctggaagtcacctcttttgctagttggatccactatctcaggactgttttattgataacaaatgtttataatgagaggttctgcttgaactacagagatatccaaatgacttttgaatactttgtgcccacattggggctgttggtgaaccggatagttttttggaatgaatagacaaagaaggagagtgaggccagaagatgctcatggtgacatgtcagtagcaagttaaagaaggatcagtgtcagatcccacaatgcatttcagcatttctagtgatgaaaggcctttagcacgggagactgcagctcctgcctctgggttcctcaagagaagaccaacacccaatgaactcttcctttctcattttgcagatgtgttctatccaactgaacaaaccacagcaggtaagttgttctatgttgtatccctgcggcctattgtccccagaacccataagttcacctctgacccagaagatgggcagaaggaagagcatgtggagtccttagctcccagttaaatttcccagtaaggtcaagcctatagcggcatatataccatggattatggctctgagttgtggaggttggggaggatcagccagaggaggcaccttcaagggtcaccaaggaggtcttgtttgtagggattccattgaccagtctcagtgcccaaggtccccatgtttcatccacaccttggccagtgtagggagcagaattactgacttcagtgcctggagaggaagtcaaaactgcttagctaatgccctggtcatttcctttcgtctaagcccctataaaactactgtggatgtctcaggccaaaaccttgaacatgaaatatcctgttccatctctgagttcctccaatgagcggtgttggtggcacatcagtacagtttagactctgaaggcctgggctttgggaaagaaaagccctttcttttctccttggcattttttgatcctaggacacagcaagaactgtttccatagcagtgcctctggccagcccagggtttgtagggaatccaattggcccagtgtcaggcatcacttttcctcaggcatgtgaggtgtcccaaggatgaggctggctttactctcactaaagtcatattccttcccaatattccactctgtttatatcaggagctgctgtgtgggtagaggtcagttctttctgtatcctgagacctttgaaggttacgcagaagctggttgcttggtgccagttgaataataccttcatatcttcactccaatccctagcaccaagtctactcttgaaggcactctgtccaagagctagggctcttttaaagtaacttaaccatatgtttgaagtttctgtctcatttaaaagtggcagattagattcatttcaaaaccagtaaaaaaacaatgagaaaggtctcacacacacatgcacatacacacacacacacacacacacactgaatcacacacatactctattgtactactcaggatgctgagttagtatgatcttgagtttcactctagctttaggtacatctagacatacagacctaaaataaaaaaacaacattcacatacaaaattgaggcaaacagtcattccacacatctgctagtgcataatatattgatcttccagccagtgtaatttaaaaagaattaattagatgtgtacgtgtgagaaaaagttttgtacttgttcccaagatctcagtgcaagtccaatgtaggcaagttagagctagggtctatgggatatccctttctataaaaatagactttagacttggaggactgaagactacatagatttctcactagtgtcaagtcaaacagcattgcccagaacagaccctgaatcacatcccatcagcaggttgactgcacttgcatgtcttggtttttctccatggagacttaacactatgtttctcatttttcttcctcatctgtatatgtacatacagagcagacaaccattcctgattatacaccaataggtaagaaaagattgtataaatctcgcactgtaggtcacaatgctgattgtattcacagcatcgacttccttgtaacacttaaggggatagggtggtgggtgtgtgctgtgaagacttagagaagctgtggatgcctcctgatcctgaggacgtccctcctgtcaaccctgtgtctgtatttctctgcctgtggagggggtcagtcagtctgctgtcgcttgacctttccctctccctgtgtgtagaagtcagtattggagtgggttccaaaactcccctgtctctacatttagtatgatgtcagaagagactctggggttagagtgattaatataagacaaccttccagagaggttgggtgacaaaatgagactgatgacctcttatgagaggccattctgattcacttcaagtgggtgcccagtcgaggaatatgtcttagtgcaaaccctctacagatgtttgtcgtgtttaaacatgctgggttgaactttgtcattaatgaaaagttcacatcagtggtcttagtgaccagcagtgacaaagcttggggaccttatttcaaacagagaggaaggtcttggagtgtgtcatgtggtcctagggcagtgtagaccagcacctttttcagattaataattttatattgggcctgatagcatttccatgtaaactctccatcttgtgtgtgtaagcatctgttgagagccttttccagggacccatgatcttctgttgtgggaggaagctatcgttctgcccctttggtctctcatagagactacctgctctaccttctcttttactgctctttttctctgttcaggatagagatgaatgtgcgcatgtgcagtgtgtgtgtgtgtgaggagttgggagggctctgcatcctctctctccttgatcctacagtgcatggtactgcaaggcctaatgaacaaggaagcgtaggtagacaaggtatcttgtcatcatccagggcagattcaacccatgccaacacagtgtgtagaaacctaggcatcctggtgaccaacttggtcctcatgtctaggacagaagtagtgacattgtagtgagggcacaggggccattgtcaaagtgagagggtacaggtctttttttttttattgggtatttatttcatttacatttccaatgctatcccaaaagtccaccacgtgctcccccctccactcccacttcttggtcctggcgttcccctgtactgaggcatataaactttgcacaaccaatgggcctctctttccactgatggccgactaggccatcttgtgattcatatgcagctagagacatgagctccggggggtgggggggaggtactggttagttcataatgttgttccacctatagggttgcagatccctttagctccttgggtactttctctagctcctccattgggggccttgtgatccatccaatagctggctgtgagcatccacttctgtgtttgctaggccctggcatagtctcacaagggacagctatatctgggttctttcagcaaaaccttgctagtgtatgcaatgggggaggggtacaggtctttacaagacagtgtggtcaggatgcagcagcaggaggtgttcatatcccatattgcttttaagttcatgagtcagtgtcccacaaagtgtacaaggtccatcatccacacgggaccaacaatggagaaaccaccatgtctttccaggaacagattctggtttggccgtgaggctggtgaacggaggagacaggtgtcagggtcgagtggagatcctttaccagggttcctggggcactgtgtgtgatgacagctgggacgtcagtgatgccaacgtggtgtgcagacagctgggctgtggctgggccgtgtctgccccaggaaatgcctactttggacagggccaagggcccattgtcctggatgacgtggcctgtggaggctatgagaactatctgtggagctgctctcaccaaggctggctctctcataactgtggacaccaggaagatgctggagtcatctgttcaggtaagacccagtgatcattacatctgcctgacagcaatgagctcaggtcactatgaatgctgttagaactccattctggcctattcatcattggtccttgtaaggattggtgactatccaggataatgcccttctcagtcattgtcctgcacaaggctctcagtctctagtgagtgtagagtatatgtgagagaggtaagcaatggaaatgcaatgtcaagtcctacccatgtgaaaggtcaaaggtcagcatacatgtgctcttgcaaggggtaatccagctttggtctggagtattggaatcctgtttctatgttgaatttggactatcagaaggacaaagctgtacagcatagcgagctgagcaaattcactgttctttttccagtgtttcacagaatccttctcagaaagtcctgcagaaggactcttctggggaagcttcagtaactccttcagttcctcaggctctgcatagttctgggttctcacagattctggttcaatacctcagtcatgataacacactagtaatattactcatgaacgttggggtgtggaaatggcagggaggtcctatgtagtatgtttatgagataaatggacaagaaatatttgtgcatggatgtagcagggatgattgctagagtcctacagaatcctttaaccatgggggtggatctttgaatcttcaacaagtcaaggatgaatgtgcttttggcccactacccacacagtaacatagaaccctggtttcctgtcatgtctgcagggggtcatgactttcttacttgctattagtcccacctggggcacggagtacatggtagaagttcatgagtaactgtattactcatggtccactctggcagcacccaccctggaacttcagcctcagctacatctgtagaaatgctgagtctgtcttccctgtgtgtccaggtgaacttcaggtgctttctatcaagtgtcctattatttctcacagatgtctgtgcctccctcagcttgggtcactgtcaacagcttggagtcccctcttcacctgttcattgtagagtcatgctttttcttctgacactagggaattattataagacacacactcctcacccctctgagttttcaccaaattcattccctgggtcatggactttcttctttgcacattcatggctgacacgccctgtctagaaggttttatgcacacagcactgggcatcatagaccccactgctgcatgctactcaaaatggatggcctgaggctgcatggttctaaccccacgttgacaggctggcacctcagagccccacactttctcctggtgctcttagagtatcttcctctgtatctggacatctgaacatttcatttcctacatgttctttactattttctacgttgattatcttactgataagtttgtatgtgtatgtgtatgtgtatgtgtatatgtatatgctaacccaggctgctgactttgatctactatttctccagcttcatttccaaatgttggaattaccactgtgagatctggtgcacagcatgcatcctggtttcatttttcctctttattgttatacagggtactgtagttctcttggtctacaataatgtgcttgccacattccccattccaacagcctcctttgtagacacagtcaggtcactgcagatgccataatgtcctggagtatatctactttgtcttgtccttaaccagccaccacttggtttgttctaactgttctttctaaagattaaggacatgtgcccttcagaagtccctccctgattaatacattttatgacacaacatacacacacacacattgacactcagacattaacacatataatccatatatacatacaaacatatttgcatggacagacacacgaacatacaaagagttacatacatggatacaaaaaccatagacatatattctcacatgcaaatatgcacatcgtagacagatacagcacagaaacacattgttatacacaacccctcccccacaaaggcacagagacacataaaatcccagaagtacacacagagacagatgtggacactgacacacaggcacacacatgtacattctattggttgtccatgcatacttacccataacatctccattagcacttgtcccttgttcagagctctctgttgaaccttcaggggcctagatatgctggattctctgcagggctgggagcactcattgctcctttcgttcctagcttggtacatgtaccaagagcctaacagggtgcctgactcaggagagtgtactgcagctcgcaggatggagggtggaactgtgagcatccaccctcatggctcctgagagccttcctgctgattccacagattatgcatatacaccaagacatattcatgcacacatgctacaccagcaacattaaccacatcctcaccattcctgagcaattacctcacagtaaccaaggaaatgggttccaagaacttctctgcttcttcttaaacctctgacgctcaagttttttatcaacttgtgtttgacccacagacaccctctgtcatccagtcatcccagatctggtccctcatagaatatcagccttgtgtgacttagtgctatatcacatcactcaagtgaggacagcaagagggaaaggttttaatattcaataatataggggcaggctattttccttcatatttttgatttatcacctgtgtagtttgtgaaggagcccatgctacaaagggccccgattggaatatttttctaagaacatcttgttcttttgacaaatcaaaaaggaacctagaaagttgagtttggagtttggggtggggcccaataagagagttgtaaaagctaccacttcagaaaggatttttgccaggattcttgtggtgaaacacacacactgaatttgcttttttctttgacagcttctcaatcaagcagtcccacacctggtaagtatattgaaaatatggacctgtatcagtgtataacttccccctatgttgtgagatgctgacacagtacatgtcaatgaattacactaggctgaaatatatagtgtctcatccagatagtaatgacaatagaaactcctgccagctataacatacagggaagcaattacagtcttcaattttgtgttactccagtctcaaatttcattatctgaagaagcaaatagaatatctgaatgtaggtcttggattcagtcctgctggaagaaattctgacaaggagacatgaagcagactcagggatctgtggttggcagatgatatgtaatgataacatgccctcttcacacttgggccaatcccagcttgtcccaagcctaaccagaatttaatgttagcaaggttacaggcccacttgtttgctattggtttgttcatttatttatgcattttttttgagatccatctagccaaggctaaccttggacttgctgtttttggcaacggtatccttgaactcctggtcttcctgtctgtaatttccaggttctaggattgcaagacgtccaatttgtttgtttgtttgtttgtttttaaatctcatcagacatgatgtgtatttcacacccagctcagatgttttttatcttttcttacaaaaaaaaatcatgtttatcaagaccttgggcagtgcacatacccaaagttgaaacactgatcccaccccaatttctcagaaggcatggctgtgcagtgaagttgaggctaactttgcaccctgtatgagaacatctctccacagtggatccaattctaatcttagctttttctttattaaggttggtggaatccaggagggacaaataatggtaaggccttcttctttgctctcgtctatggcgttgggctattaatgaaattggggttggatctgtttcctgttgctgtgatcacacactggccctaagcaacctggaggaagacaagtctatttggcttgcaggtcaccatccatcattgagtgaaaccaggacaggacctgtaggcaggaacttaagcagaggccatggaggatccctgttacctggctttctgactcatgtttagctagtgtttttacacagcacgggctcacctgcctaaagatatggggctcaacttgtcctgaccattatcaatcaaagaagtccatacagacagctccataggcaattctgatgagggcgactcccagattgtgagtcctgtacatacttagctggagttctgttgacagtggagataacgaggacaactggccagcattgctgctgctgctgctgtagctgctgctgtaggtgctgctgctgttgctcctgctgctcctgctgctcctgctgctcctgctgctatctggtggaatttaatgggattgttgggcacaaaagtcagggatggagtaggatgagagacatgggtgtcacactgctgggcagaccctaccaatctccacccttcatcttcattcttctctctgccctcagtcatgtgatagatgaagttagtttcagcctcctgtcagagggctagtagaatacagtcattgaatcttcctcccaaaattaaaaatattgcacatcattaatgctcacctattacaggtagtatgtgctatcatcaggatatgttcctggcagggaatccaggggaagcttttgactatattccagaaaggccaaaccaaggcaggtagttctccaggatgatcattcagagagtggccagcagagggcagtaagattgtttcctgcagacccagagctttctttgggaatgccttggaaggctcagttggcctttgcaaatcctcatagcaccctctgaagatcaccaacaacagcaactgtcttagcccctccctcaccttgcatccacttcctctcactctcagaccacagagttctcacaacaacagaggagccactgaagggtacacccaggattggctcctcctgtcaggaggctgaacctgttctttcctgctatcacacagctgctgtctgtttcctctcacaacacagcacagattcatgtgtgagagacttagggccagcactccacacagaagcctgctgcctgcccagtcatgtgcatccttacagtgggagagcaggctggagggctggagagaagactgctgttggttggactccattgtacccttgaccttgataaagatgggttggatgcagaagcaccttgtgtgtgtgtgtgtgtggtatgtgagtgtgagtgtgtgtgtgtgtgtattcccatgtagattgccagcttaaccattgataggtaggatgtactgttaacatgtcacagaaaacagtgtgattgtgatgatcacaccccaccggacaataggagaaggatcatggttctgccaatagacacactgtgactgtgtttattctgtccttctggaataatcgtgggaatttgtttcttttgcttgtcagagccactctctcagaaccgttttagtgatggcagaggttctgtttgaacaacagaaacatcctaataacttttggatactttgtgtctacaatggggccattggtgaaccgttctcttattttggggggtggtagtggtgaaatagaagcaaagatgaaggagagtgaggccaagagatgctcatgacatgtcagtagccagttaaagaaggatcagtgtcagatcccacactgcatttcagcatttctagtgatgaaaggcctttagcacgggagactgcagctcctgcccctgggttcctcaagagaagaccaacacccaatgaactcttcctttctcattttgcagatgtgttctacccaactgaacaaaccactgcaggtaagttgtgctatgttgtatccctgtggcctattgtccccagaatccccaggctcatctcctatcagaaaatgggcagaaggaagagcatgtggagtcctcagctcccagggaaatttcccagtaaggtcaggcctatagcggcgtatatgccatggattatggccctgagttgtgcaggttggggaggatcagtagaggaggcaccttcaagggtcaccaaggacttcttttttatagggattccattgaccattctcagtttcctgaggtccccatgtttcacccacaccttggccagtccagagagcaagccttgggcttcagtttctggagaggatatcaaaactctgcttagccaatgtcttgtcatttccctttttctgtggcctcataaagctattgtggatgcctgaatccccaacctgggacatgaaagattctgttttatctctctgagttcctctaatgagggttgtttgtggcacaccagtgtagtttagactctgatggcctggggtttgggaaagaaaatctttcttttttccttgaaatttttatcctagaacacagcaaggactgtttccatagtggtgcctctggtcagcacagagtttgcagggaatccaattgttccagtgtcaggcatcactttcccttatgcatgtgaggagtcccaaggttgaggctggctttactctcactaaagccatattccatcccaagattccacccagattatatcaggagctgctgtgtggggagaggtcaattctttctgtatcctgagacctttgaaggttatgcagaggctggttgcttggtgccagtgggttaatgtcttgatatcatcactccaattcccagcaccaagtctactcttgaaggcactgtgtctgagagccagggctcttttaaagtaatttaaacatatgttttaggtttgtgtgtcatttaaaaaggacagattagagtaatttcaaaacagtaaaaaaaaacaatgagcaggtccacacacacatatacacaaccacacacacatacataacacacacaactgcacatagataacacatacacacacagctgtgagtgtaggaagacatacaatattctaccactcatgatgctgagctagtaggttgttgagtttcagtctagcctagggtacatgaggcagtcatgtgatccaggacagtaggggacagtcagctcattcaggtttataattttgtattaggcctgaaagcaattctaatgtaaactgtcaaccatgtgtatgtaagcagctgttgagagcctttgccatgcactcttttgacggtaggatcatctttaagcccctttggtctattttagaccaaccagctctgccttctcatttactgctgacaggtatggatcaaggtagagagtaatgtgtgcaggtccagtgtgtgaggagttgggaggagtttgcaaccactctctccttgaaatagtcttgattctacagtacacggccctccaagccattggtacaaggtagagtaagtttcttgtcaccattcaaggcagattcaaactatgccaacacagtttgcagaaacctattcacccaggtgaccaacttggtcctcatgtctaggacagaagtagagagcattgtagtgagggttcacaggcaaagtgagagggtacagatctttacaggacagtgtggccaggatgcagcagcaggagctgttcatgtcccatattgctttaaagttcataagtgagcagcctacaaagtgtacaagtgagacatgaccaacaatggagaaaccaccatgtctttccaggaacagattctggtttggctgtgaggctggtgaacggaggagacaggtgtcagggtcgagtggagatcctttaccagggttcctggggcactgtatgtgacgacagctgggacaccaatgatgccaacgtggtgtgcaggcagctgggctgtggctgggccgtgtctgccccaggaaatgcctactttggaccgggctctggatctattgttctggatgacgtggcctgtacaggacacgaggactatctgtggagatgttcccaccgaggctggctctctcataactgtggacaccatgaggatgctggagtcatctgttcaggtaagacccagtgatcattacatctgcctgacagcaatgagctcaggtcactatgaatgctgtcagaactccaccctggcctattcattggtccttgtaaggtttggtgaatatcccagacaatgcccctcttagccatggtcctccacaaggctcttagtctctagtgagtctagactttatgtgagagagagaaggcatggaaatgtagtgtcaagtcccacacttgagaaaggaccaggatcagcatacatgtgctcttgcaagaaatcaaccagccttggtctggagtattggaatcctgtttctatgttgaatttggactatcagaagggcaaagctgtacagcatagtgagctgagcatattcactgttctttttccagtgtttcacagaatccttctcagaaagtcttgcagaaggactcttctgggcaagcttcagtaactttcttcagtccctcaggctctgcagagttctgggttctcacagatcaggttcaatagctcaatggtgataaaacagtggaaatgttactcatgaatataggggtgtgggcatggcagggaggtcctatgcattatgttcatgagataaatggacaggaaatatttgggcatggatgtagcatggaggattgctagagtcctacagaatcctttaaccatgaggatggatctttgaatcttcaacaagtcaagacagagtgtgttattggcccattacccacacagtaacatagaaccctggtttcctgtcatgtctgcaggtggtcatgattttttacttgctattattaaactgcataaaaccgggtcccacctggggcaaggagtacatggcagaaattcgtgagtaactgtattattcatggtctgctctggcagcaccagccctggaacatcagcctcagctgcatctgtagaaacgctgagtctgtcttctcttgatgtccaggtgaacttctagggactttctatgcactctccttttatttctcacagatgtctgtgcctccccagctcaggtcaatgtcaacagcttggattcccctcttctcctattcattgtagagtcatgctttttattctggtactaaggcattactgataagacatacactcctcaaccactctgaattttcatcaaattcatacactgggttatggactttcctctttgcacattaacggctggtccggcctgtctagtaggttttatgcacacagcactgggcatcatagaacccactgctgcatgctagtcaaaatggatggcctgaggcttgcatggtgctaacccaagtgggcaggctggcacctcagagagccacactgtctcctggtgctctttgtgtatcttcctctgcattgagacatctgaatgttttagttcctacacgttctttcctgttttctacattgattatcttactgatatataaatgtatatgtatacatgtaagtatatgtttatgtataacataaaccaggctgctcactttgacctagtaattctccagcctcatttccaaatgctgggatttctactctaatcctcagtgcccagcatacattttggttacagttcttctccttattttacaggatattttagttcactcagtctacaatactttgcttgccacattccccattccaatagcgccctctgtacacgcagtctgctcactgctgatactatgatgtcctggagcaggtctactttgtcctgtgtttaaccagccaccatttggtttgttctaactgttctctaaagatcaaggacactgtgccttttagaggtccctccctgatttacaccttttaagacatacaaacacatgcacacaattacacataaacacacacacacacattgacactcagacattaacacatataatccatatatacatacatacacatttgcatggacagacacacaaacatacaaagagttacatacatggaccaaaaaccatagtcatatatatctcacatgcaaatatgtacatcatagacagatacaacacagatacacattgttatacaaactccccacacacagagacacagagacatacacaatcccagaacacacagagacagatgtggacactgacacacagacacagacatgtacattctatgtcattgagtgtccgtgtatattctcccacaacacctccagtagcacttgtcccttgttcaaaactctctgttgaaccttcaggggcctagatatgctggattctctgcagggctggaagctctcattgctcctttcgttcctagcttgggacatgtaccaagagcctaacagggtgcctgactcaggagagtgtactgcagctcacaggatggagggtggaactgtgaccatcctccctcatggctcctgggagccttcctgctgattccacagattatgcatattcataaagacatatttatgcacacatgatacaccagcaacattaaccacacctcaccattcctgagagatcatctcttagtttccaaggaaatgggttacagagactgctttgcttctacccaaagcatctgacactcaagtctttatcagttggtgtgtgacccatagacacctttctgtgtcctgccagtcatcccagatctagtccctcatcgattatcagccttgtgtgactcagtggtatatcacatcgctcacgtgaggacggcaagagggaaagattttcatgctcagtaatacagagtcaggctgttttccttcatcgttttgattcaccccctgtgtaattggtgtagacgcccatgatacaaatgacctggactagaatatttctaagacgatcttgctcttttgaccaatcaaaaaggaacctagaaagttgagtttggtctttggggtggggcccacataggagagttgtaaaagctaccacttcagaaaggatttttgccaggattcttgtggatgaaatgcacactctgaatttgtttttatttttttgatagcttctcaatcaagcagtcccacacctggtaagtacattgcaaatatggacctgtatcagtgtataacttccccctatgttgtgattgatcctgacacactccatgctaataaatgacactcggctggaattcatagtgtcccatctagacagtaacgacaacagaaactcctgccagcgctagtataaagcgtcctgtggtaagacaattacagtcttcaattttatgttttcctgcctcaaatttcagttgatgttagaatcaaatagaatatctgaatgcaggtctttgattcagtccttccgcaagtagctctaactgtgagacatgaatcagactcagggatctgtgattggtaggtgatatgtaaggttatcatgccctcttcacacattggccaacgcctgcttgtcccaagactaatcaggatctaatattcacaaggttacagggccacttggttgctattggttggtttatgtactatttcttgagtctgacctcgctcaggctaaacttggccttgctgtttttggcaagggtccccctgaactcctgatcatcttttctgtagtttcctttgtgtaatttatttatttattagatattttctatatatacatttcaaatgctatcccaaaagttccctataccctccctccaccttgctcccctactcacccacacctgcttcatggccctggcattcccctgtactggggcatataaagtttgcaataccaaggggcctcccttcccaatgatggttgactaggccatcttctgctacatatgcagctttttctgtagtttccaggttctaggattccaagattttgctaccatgtccagctgttttaatcacattggacatgaggtgtattttacctctatcccagatgttttttttttctcttcttacaaaacaataaatttgctgctgctggtggtggtggtggtggtagtgatcttgctggttctcccgctgctgctgctgtctggtggaatccagtggaatcataaggcacagaaatcatggttgaggtagagatgagagacatgggtgtcacactgctgggcagacctgaccaatccccagacttccccttcattcttctctctgccctcagtcatgtgatgggtgaaataagcttcagcctcctgtcagaaggcagcctccagtcagccttcctgctagtggaagacagtcacttactaatccttccaaaattaaaaatattgcatatcatgaatgctcagctatcacaggtagtatgtacttttaacagaacacatacatgtcggggaatccagaggaagattttgaccaacttctagaaaggaacaaaccaagccttgcagttctctagggggaaccaatcagagagtgaccagcagagggcagtaagtttgtgtcctgcagacccagagccttctttgggaacaccttggaaggatcaggtggcctttgccaatcctcatagcaccctgtgaagatgtccaacaacagcaactgtgttcccatgtgaattgctggtttaaccattgatacatagagtttactgtgcacaagtcatagggaacatagtgtgactgtggagatccccgccctcctgagaatggcccttaaaaggaacatggccctgccggcagccacattgtgactgtgtttattctgacctcccacagtaatcactggaagtcgcttctcttgctagttggaggcagtttctcaggaggactcttttacctatggtaaatgttcacaatgagagcttctgtttgaactacagaattctccatgtgacttttggatactctgtgctgttggtgaaccagatagtttttcagatggaatagatacagagatgaagaagagtgaggccaagagatgctcatgacatgtcaggagccagttaaagaaggatcagtgtcagatcccacaatgcatttcagcatttctagtgatgaaagtctttagcacgggagactgcagctcctgcttctaggttctctaagagaagaccaacacccaatgaactcttcctttctcattttgcagatgtgttctacccaactgaccaaaccacagcaggtaagttgtgctatgttgtatccctgtggcctattgtccccagagcccataagcttacctctgacccagaagacgggcagaaggaagagcatgtgaagtcctcagctcccagggaaatttcccaataaggtcaggcctatattggaatatatgccatggattagggccccgaattgtggtgcttggtgaggatcagccataggaggcaccttcaagggtcactaaggaggtcttgttactagaggttctattgaccattctcagtgccctgaggttccgatgttttaccctgtaccttggcgaactcagggatcagagtctctgacttcagtccttggagaggaaataaaaactccgcttagctaatgcccttgtcttttcctttcctctaaggccttataaagctactctggattcctgaatccccaacctgggacattaaagatcctttctatctctctgagttcctccaatgagcggtgttggtggcacatcagtatagtttagactctgatggcctaggctttgggaaagaaaatctctttcttttttccttggcattttttgatcctaggacacagcaagaactgtttccatagcagtgcctctggccagcccagggtttgtagggaatccaattggctcagtgtcaggcatcactttttcttatgcatgtgaggagtcccaaggatgaggctggctttactctcactaaagccatattccatcccaagattctacctagtttatatcaggagctgctgtgtggggagaggtcaattctttctgtatcctgagacctttgagggttacgcagagctggttgcttggtgccagtggattaatgtcttgatatcatcactccaatccccagcaccaagtctactcttgaaggcattgtgtctgagagccagggctcttttagtaatttaaacatatgtttgaaatttgtctcacatttaaatgggacatattagaatcatttcctaaacaggaaaaaaaagagcatggtcaagcacacacaaacacagccacacacacatacacagctcaaccatacacacacacaacacacacaaccacacaaatacacaatacacatactcgcacacacctcctcatgtaagcacacatacagtattctacctctcatgatgctgagctagtaggatcttgagtttcagtctagcctaaggtgcatccagaggtactgaaccaaacaggctttccacacatatgctagtgaatattatattggtctaccagccagtgtaattctaaaagaagaattaattacatgtgtttgtgtgagaaacatttttgcactggttccctagagctcagtgcaagtcctacattggcaagttagagctagggtctatggcttaacactttctataaaaaaagaggttgagacttggagaactcaactttctctaaaagtagacttggagacttggaggactgaagactacacagatttctcactagtgtcaagtcaaacagcattgcccagaacagaccctgaatcacatcccatcagcaggttgactacacttgcatgtcttggtttttctcaatggagacttaacaccatgtttctcatttttcttcctcatctgtatatggacatacagagcagacaaccgttcctgattatacaccaataggtaagaaaagattgtatagatctcgcactgtaggtcacaatgctgattgtattcacagcatcgacttccttgtaacacttaagggcatagggtggtgggcgtgtgctgtgaagacttagaggagtggggatgcctcctgaccctgaggacgtccctcctgtcaaccctgtcactgtctgtatttctctgcctgtggaggggatcagtcagcctgctgtcccttgacctttccctctccctgtgtgtagaagtcagtatttgtgtgggttccaaaactccccggtctctacatttagtattatgtcagaagagactctggggttagagtgcttaatataagacaaccttccagagacttttggtgacaaaatgagactgatgacttttttgcgaggccattctgattcacttcaagtgggtgcccaattgagaaagctgtgtcttagtgcacactgtgtgcagatatttgtcctgttaaaactgttgggttgaactttgactttaatgaaaagttcacaccagggtcctagtgaccagcagtgacaaagcttggggtcctctagtgtggtctcattccagacagagagtgaggtggtggtggctgtcatgtcacccgagccattgggtccgagcagctccttcaggtttataattttatattgggtctgaaaggagttcttatataaaaatgaaactggtgtttgtgtgtgtgtgtgtgtgtgtgtgtgtgtgtgtgtgtgtgtgtgtgtgtgtgtcagcagctgttgagagcctttttccgggacccatgaacttctgttgtggcaggaagctatcctttgcccctttggtgtctcatataccaccttgctatgcatcgcctttactgctggcagatatggggcatggtggaggtgaatgtgtgcatgtacagtgtgtgtgtgtgaggagttgggagggctctgcatcctctctctccttgaaacccacttaatcctacagtgcatggtactccaaggcataatggcaaggtagagtaggtagacaaggtatcttgtcaccatccagggcagattcaacccatgccaacacagtgtgtagaaacataggcatcctggtgaccaacttggtcctcatgtctagaaaagatgtagtgacattgtagtgagggcacaggggccattgttaaagtgagagggtacagatctttacaggtcagtgtggccaggatgcagcagcaggagctgttcatgtcccgtattgctttaaagttcatgagtgagctgccaccaagtgtacaagtgagacatgaccaacaatggagaaaccaccatgtctttccaggaacagattctggtttggccgtgaggctggtgaacggaggagacaggtgtcagggtcgagtggagatcctttaccagggttcctggggcactgtgtgtgacgacagctgggacctcaatgatgccaacgtggtgtgcaggcagctgggctgtggcttggccgtgtctgccccaggaagtgccaggtttggacagggcacagggcccattgtcatggatgacgtggcctgtggaggctatgaggactatctgtggagatgttcccaccgaggctggctctctcataactgtggacaccatgaggatgctggagtcatctgttcaggtaagacccagtgatcattacatctgcttggctgcaatgagctcaggtcactatgaatgctgtcagaactccatcctggcctcttcattggtccttgtaaggattggtgaatattccggacaatgcccttctcagtcatggtcctgcccaaggctctcagtctctagtgaggcttgagtttatgtgagagagggaagccatagaaatgcagtgtcaagtcccacacttgagaaaggaccagggtcagcatacatgtgctcttgcaagaagaaaaccagccttggtttggagtattggaatcctgtttctatgttgaatttggactatcagaagggcgaagctgtatggcatagcgctctgagcaaattcagtgttctttttcaatgttccccagaatccttcccagaaagtcctgcagaaggactcttctgggcaagcttcagtaactccttcagtccctcaggctctgcagagttctgggttttcactgatcgggttcaatagctcaatggtgataaaacagtgggaatgttactcatgaatggagatcctgtgtagtatgttcatgaggtaaatggacaaaaaatatttgtgcatggatgtagcatggagaattttagagtcctacagaatcctttaaccatgagggtggatctttgaatcttcaagaagtcaagcctgagtgtgcttttggcccaatacccacacagtaacatagaaccctggtttcctgtcttgtatccaggctctcataattttcttacttgctattagtaaactgcctcaaaccaggtcccacctggggcacggagtacatggcagaaattcatgagtaactgtattattcatggtctgctctggcagcaccagccctggaacatcagcctcagctgcatctgtagaaacgctgagtctgtcttcccttgatgtccaggtgaactgctagggactttctgtccactgtccttctatttctcacagatgtctgtgcctcccgcagctcaggtcaatgtccacagcttggagtcccctcttctcctattcattatagagtcatgctttttcttctgacactagggaattattgataagacatacattcctcacccctcagatttttcaccaaattcattcgctgggtcatggactttcctctttcacattcatggctgacaagacctgtctggtatgttttatgctcacagcactgggcatcatagaccccactgctgcatgctactcaaaatgcatggcctgaggcttgcatggtgctaacccaagttggcaggctggcacctcagagtgccacaatgtctactggtgctctttgtgtatcttcctctgcatcgagacatctgaatgtttcagttcctccatgttctttcctgttttctacattgattatcttactgatatataagtgtacatgtatacatgtaagtatatgtttatgtataacataaaccaggctgctcacttttacctagtaattctccagcttcatttccaaatgctgggatttctactccaatcctcagtgcccagcatacactctggttacagttcttctccttatcttacaggatattttagttcactcagtctacaatactttgcttgccacattccccattccaatagcgccctctgtagacacagtctgctcactgcagatgctgtgatgtcctggagcaggtctactttgtcctgtgtttaaccagccaccatttgttttgttctaactgtctctaaagatcaaggacactgtgccttttagaggtccctccctgatttacaccttttaagacatacaaacacatgcacacacttacacataaacacacacacacattgacactcagacattaacacatataatccatatatatgtacatacacatttgcatggacagacacacaaacatacatagagttacatacatggaccaaaaaccatagtcatatatatctcacatgcaaatatgtacatcatagacagatacaacacagatacacattgttatacatgctctccacacagagagacacacacaatcccagaagttcacacagagcaagatgtggatactgatacacagacacacacatatacattctttgtcattgagtgtccatgtatattctcccacaacacctccagtagcacttgtcccttgttcaaagctctctgttgatgccttcaggagtctagatatgctggactctctacagggctgggagcactcattgctcctttcgttcctagcttgggacatgtatcaagagcctaacagggtgcctgactcaggagagtggagagtgtactgcagctcacaggatggaggatggaactgtgagcatccaccctcatggctcctgagagccttcctgctgatttcacagattatgcatatacaccaagacatattcacacacacatgctacaccagcaacattaaccacattcttcccattcctgagagatcatctcttagtttccaaaggaaatgggttccaagaacttctttgcttctacccaaagcatctgacactcaagtctttatcagttggtgtgtgacccatagacacctttctgtgtcctgccagtcatcccagatctagtccctcatcgattatcagccttgtgtgactcagtggtatatcacatcgctcatgtgaggacagcaagagggaaagattttcgaaagtttttcatgctcagtaatacagagtcaggctgttttccttcatcgttttgattcaccccctgtgtaattggtttagacgcccatgatacaaaggacctggactagaatatttctaagactaacttgctcttttgaccaatcaaaaaggaacctagaaagttgagtttggtctttggggtggggcccacataggagagttgtaaaagctaccacttcagaaaggatttttgccaggattcttgtggatgaaatgcacactctgaatttgtttttatttctttgacagcttctcaatcaagcagtcccacacctggtaagtacattgcaaatatggacctgtatcattgtataacttccccctatgttgtgattgatcctgacacactccatgctaataaatgacactcggctgaaattcatagtgtgccatctagacagtaacgacaacagaaactcctgccagcgctagtataaagcgtcctgtggtaagacaattacagtcttcaattttatgttttcctgcctcaaatttcagttgatgttagaatcgaatagaatatctgaatgcaggtctttgattcagtccttccgcaagtagctctaactgtgagacatgaatcagactcaggatctgtgattggcagatgatatgtaaggttatcatgccctcttcacacattggccaacgcctgcttgtcccaagactaatcaggatccaatattcacaaggttacagggccacttgtttgctattggttgatttatgtactatttcttgagtctgacctcgctcaggctaaccttggccttgctgtttttggcaagggtccccctgaactcctgatcatcttttctgtagtttcctttgtgtaatttatttatttattagatattttctttatatacatttcaaatgctatccctccaccctgctcccctacccacccactcctgcttcatggccctggcattcccctgtattggggcatataaagtttgcaataccaaggggcctcccttcccaatgattgttgactaggccatcttctgctacatatgcagctttttctgtagtccaggttctaggattccaagattttgctaccatgtccagctgttttaatcacattggacatgaggtgtattttacctccagcccagatgtttttttttttttttctcttcttacaaaacaataaatttgctgctggtggtggtggtggtagtgatcttgctggttctccagctgctgctgctgtctgatggaatccagtggaatcataaggcacagaaatcatggttgaggtagagatgagagacatgggtgtcacactgctgggcagacctgaccaatccctacccttccctgtcattcttctctctgccctcagtcatgtgatgggtgaaattagattcagactcctgtcagaagggctagtggaagacagtcactgactgtttgaactacagaattctccatgtgacttttggatactctgtgctgttggtgaaccagatagttttttagatggaatagatacagagatgaagaagagtgaggccaagagatgctcatgacatgtcagtagccagttaaagaaggatcagtgtcagatcccacaatgcatttcagcatttctagtgatgaaaggcttttagcacgggagactgcagctcctgcttctaggttctccaagagaagaccaacacccaatgaactcttcctttcttattttgcagatgtgttctacccaactgaccaaaccacagcaggtaagttgtatccctgtggcctattgtccccagaacccataagttcacctctgacccagaagatgggaggaaggcagagcatgtggagtccttagctcccagggaaatgtccccataaggtcaggcctatatgggtatatagaccatggattatggtcctgaattgtggtgactggggaggatcagacaaaggaggcaccttcaagggtcaccaaggaggtcttgttactagaggttctattgaccattctcagtgccctgaggttccgatgttttatcctacaccttggccaacccagggagcagagtctctgacttcagtccttggagaggaaatcaaaactctccttaaccgatgcccttgtcatttcctttcgtctaaggccttaaaaagctactctggatgcctgaatccccaatctgggacattaaagatcctgtttcatctttctgagttcctccaatgagcagtgttggtggcacatcagtacagtttagactcttatggcctgggctttgggaaagaaaagccatttcttttctcctgggcattttttgatcctaggacacagcaagaactgtttccatagcagtgcctctggccagcccagggtttgtagggaatccaattggcccagtgtcaggcatcacttttccttaggaatatgaggtatcccaaggatgaggctggctttactctcactaaagccatattccatcccaagattccacccagtttatatcaggagctgctgtgtgggggagaggtcaattctttctgtatcctgagacctttgaaggttacgcagagctgtttgcttggtgccagtgggttaatgtcttgatatcatcactccaatccccagtaccaagtgtattcttgaaggcactgtgtccaagagctagggctcttttaaagtaatttaaacatatgcttgaagtttgtctctcatttaaatgggacatattagaataatttcctaaacaggaaaaaatgagagcatggtcaagcacacacaaacacagccacacccacatacacagcacaacgatacatacacacaacacacacaaccacacatacacaacacacatactcacacacccctatgcatgtaagcacacatacagtattctaccactcatgatgatgagctaataggaacttgactttcagtctatcctaaggtgcatccagaggtactgaaccaaacaggctttccacacatatgctagtgaatattatattggtctaccagccagtgtaattctaaaagaagaattaattacatgtgtttgtgtgagaaacatttttgcactgattccctagagctcagtgcaagtcctacgttggcaagttagagctagggtgtatggtttaacactttctataaaaaaaagaggttgagacttggagaactcaactttctctaaaagtagacctggagacttggagaactgaagactacatagatttctcactagtgtcaagtcaaacagcattgcccagaacagaccctgaatcacatcccatcagcaggttgactgcacttgcatgtcttggtttttctccatggagacttaacactatgtttctcatttttcttcctcatctgtatatggacatacagagcagacaaccgttcctgattatacaacaataggtaagaaaagattgtataaatctcgcactgtaggtcacaatgctgattgtattcacagcattgacttccttgtaacacttaagggcatagggtggtgggtgtgtgctgtgaagacttagagaagttgggatgcctcctgatcctgaggacgtccctcctttcaaccctgtcactgtctgtatttctctgcctgtggaggggatcagtcagcctgctgtcccttgacctttccctctccctgtgtgtggaagtcagtattggtgtgggttccaaaactccccggtctctacatttagtattatgtcagaagagactctggggttagagtgattaatataagacaaccttccagagaggttgggtgacaaaatgagactgatgacttttaggcgaggccattctgattcacttcaattggttgcccagttgagaaagctgtgtcttagtgcatgctgggtgcagacatttgtcgtgtttaaacatgctgggttgaaccttgactttaatgaaaaaattcacatcagtggtcttagtgaccagcagtgacaaagcttggggtcctctattatggtctcattccagacagagtgtgaggtggtggtggcagtcatgtcacccgagacattggggtcccagcagctccttcagatttataattttatgttgggtctgaaaggagttatgatacaaaactgaaactggtgtttgtgtgtgtgtgtgtgtgtgtgtgtgtgtgtgtgtgtgtgtaagcagctgttgaaagcctttttccgggacccatgaacttctgttgtggcaggaagctatcctctgcccctttggtgtctcatataccaacttgctatacatcgcctttactgctggcagatatggggcatggtggaggtgaatgtgtgcatgtgcagtgtgtgtgtgaggagttgggagggctctgcatcctctctctccttgaaacccacttaatcctacagtgcatggtactccaaggcataatggcaaggtagattaggtagacaagttatcttgtcaccagctagggcagattcaacccatgccaacacagtgtgtagaaacataggcatcctggtgaccaacttggtcctcatgtctagaaaagatgtagtgacattttagtgagggttcacagtcaaagtgagagggtacagatttttacaggacagtgtgtccaggatgcagcagcaggagttattcatatcccatattgttcatgagtgagtggcccacaaagtgtataagcttcatcacccacaatgaaccaacaatggagaaaccaccatgtctttccaggaacagaaaacagtttggccgtgaggctggagaatggaggagacaggtgtcagggtcgtgtggagatcctttaccagggttcctggggcactgtgtgtgacgacagctgggacctcaatgatgccaatgtggtgtgcaggcagctgggctgtggcttggccgtgtctgccccaggaagtgccaggtttggacagggcacagggcccattgtcatggatgacgtggcctgtggaggctatgaggactatctttggagatgttcccaccgaggctggctctctcataactgtggacaccatgaggatgctggagtcatctgttcaggtaagacccagtaatcattacatctgcttggctgcaatgagcttaggtcactatgaatgctgtcagaactccatcctggcctcttcattggtccttgtaaggtttggtgaatatcccggacaatgcccttctcagtcatggtcctgcccaaggctctcagtctctagtgaggcttgagtttatgggagagagggaagccatggaaatgcagtgtcaagtcccacacttgagaaaggaccagggtctgcatacatgtgctcttgcaagaagtaaaccagccttggtttggagtattggaatcctgtttctatgttgaatttggactatcagaagggcaaagctgtatggcatagcacactgagcaaattcactgttttttttccacattgttccccatctcagaaagtcctgcagaaggactcttctgggcaagcttcagtaactccttcagtccctcaggctctgcagagttctgggttttcacagatcgggttcaatagctcaatggtgataaaacagtgggaatgttactcatgaatggagatcctatgtagtatgttcatgagataaatggacaagaaatatttgtgcctggagaaatttagagtcctacagaatactttaaccatgacggtggatctttgattcttgaagaagtcaagcctgagtgtgctttaggcccaatacccacacagtaacatagaaccctggtttcctgtcatgtatccaggctctcacaattttcttacttgctattagtaaactgcctcaaaccaggtcccacctggggcacggagtacatggtagaaattcatgagtaactgcaatattcatggtctgctctggcagcaccagccctggaacatcagcctcagctgcatctgtagaaacgctgagtctgtcttccctggatgtccaggtgaactcctagggactttctgtccactgtccttctatttctcacagatgtctgtgcctcccccagctcaggtcaatgtcaacagcttggagtcccctcttctactattcattgtatagtcatgctttttattctgacacgagggaattatcgataagacacacactcctcacccctctgagttttcaccaaattcatacgctgggtcatggactttcctctttgcacattcatggctgacacgacttgtctggtatgttttatgctcacagcactgggcatcatagaccccactgctgcatgctagtcaaaatggatggcctgaggcttgcatggtgctaaccccaagtgggcaggctggcacctcagagtgccacactgtcacctggtgctctttgtgtatcttcctctgcatcgagacatctgaatgtttttagttcctccatgttttttcctgttttctacattgattatcttactgatatataagtgtacatgtatacatgtaagtatatgtttatgtataacataaaccaggctgctcactttgacctagtctctccagcttcatttccaaatgctgggatttctactcaaatcctcagtgtccagcatacactctggttacagttcttctccttattttacaggatactgcagttcactcaggctacaatactttgcttgccacattccccattccaatagcgccctctgtagacacagtctgctaactgcagatggtataatgtcctggagcaggtctactttgtcctggtttaaccagccaccatttggtttgttctaattgttctctaaagatcaaggacactgtgccttttagaggtccctccctgatttacaccttttaaaacatacaaacacatgcacacacttacacataaacacacacacacattgacactcagacattaacacatataatccgtatatacgtacatatacatttgcatggacagacacacaaacatacatagagttacatacatggaccaaaaaccatagtcatatatatctcacatgcatatatgtacatcatagacagatacaacacagatacacattgttatacacgctctccacacacagagacacacacaatcccagaagttcacacagagacagatgtggacactgacacacagacacacacatgtacattctatgtcattgagtgtccatgtatattctcccacaacacctccagtagcacttgtcccttgttcaaagctctctgttgatgccttcaggagtctaggtatgctgaactctctacagggctgggagcacacattgctccttttgttcctagcttgggacatgtaccaagagcctaacagggtgcctgtctcaggagagtgtactgcagctcacaggatggaggatggaactgtgagcatccaccctcatggctcctgagagccttcctgctgatttcacagattatgcatatacatcaagacatattcacacacacatgctacaccagcaacattaaccacacctcgccatccctgagagatcatctcttagtttccaaaggaaatgggttgcaggaacttctttgcttctacccaaagaatctgacactcaagtcttcatcagttggtgtgtgacccatagacaccttcctgtgtccttccagtcatcccagatctagtccctcatcgattatcagccttgtgtgactcagtggtatatcacattgctcacgtgaggacggcagagggaaagattttcatgctcagtaatacagagtcaggctgttttccttcatcgttttgattcaccccctgtgtgattggtttagacgcccatgatacaaaggacctggactagaatatttctaagactatcttgctcttttgaccaatcaaaaaggaacctagaaagttgagtttggtctttggggtggggcccacataggagagttgtaaaagctaccacttcagaaaggatttttgccaggattcttgtggatgaaatgcacactctgaatttgtttttatttctttgacagcttctcaatcaagcagtcccacacctggtaagtacattgcaaatatggacctgtatcattgtataacttccccctatgttgtgagtgattgtgacacactccatgctaataaatgacactaggctgaaattcatagtgtgccatctagacagtaacgacaacagaaactcctgccagcgctagtataaagcgtcctgtggtaagacaattacagtcttcaattttatgttttcctgcctcaaatttctgttcatgttagaagcgaatagaatatctgaatgcaggtctttgattcagtccttccgcaagtagctctaactatgagacatgaatcagactcaggatctgtgattggtaggtgatatgtaaggttatcatgccctcttcacacattggccaacgcctgcttgtcccaagactaatcaggatccaatattcacaaggttacagggccacttgtttgctattggttggtttatgtactatttcttgagcctcacctccctcaggctaaccttggccttgctgtttttggaaaaggtccccctgaactcctgatcatcttttctgtagtttcctttgtgtaatttatttatttattagatattttctttatatacatttcaaatgctatcgcgaaatttccctataccctccctccaccctgctcccctacccacccactcctgcttcttggccctggcattcccctgtactggggcatataaagtttgcaataccaaggggcctcccttcccaatgatggttgactaggccatcttctgctacacatgcagcttttcctgtagtttccaggttctaggattccaagattttgctaccatgtccagctgttttaatcacattggacatgaggtgaattttacctccatcccagattttttttctcttcttacaaaacaataaatttgctgctgctggtgatggtggtagtgatcttgctggttctccagctgctgctgctgtctggtggaatccagtgggatcataaggcacagaaatcatggatggagtagagatgagagacactggtgtcacactgctgggcagaccttaccaatccccacccttccgtgtcattcttctctttgccctcagtcatgtgatgggtgaaattagattcagcctcatgtcagaagggctagtggaatacagtcactgactactccttccaaaattaaaaatattgcacatcatcaatgctcagctattacaggtagtatgtagttttaacagaacatatatgtgttggagatgcaagaggaagatttttgaccaacttctagaaagggccaaaccaaggcttgcagttctctagggggaaccaatcagagagtgaccagcagagggcagtaagtttgtgtcctccagacccagagccttctttggaacaccttggaaggctcaggtggcctttcctatcgtcattgaccctgtgaagatgtccaacaacagcaactgtgttcccatgtgaattgctggtttagccattgatacatagagtttactgtgcgcaagttacagggaacatagtgtgactgtggagatccccacccacctgagaatggcccttaaaaggaacatggccctgccggcagccacattgtgactgtgtttattctgacctcccacagtaatcactggaagtcgcttctcttgctagttggaggcagtttctcaggaagactgttttacctatggtaaaggttcacaatgagagcttctgtttgaactacagaattctccatgtgacttttggatactctgtgctgttggtgaaccagatagttttccagatggaatagatacagagatgaagaagagtgaggccaagagatgctcatgacatgtcagtagacagttaaagaaggatcagtgtcagatcccacaatgcatttcagcatttctagtgatgaaagtctttagcacgggagactgcatctcctgcttctaggttctccaagagaagaccaacacccaatgaactcttcctatctcattttgcagatgtgttctacccaactgaccaaaccacagtaggtaagttgtgctatgttgtatccctgtggcctattgtccccagagcccataagcttacctctgacccagaagacgggcagaaggaagagcatgtgaagtcctcagctcccagggaaatttcccaataaggtcaggcctatattggaatatatgccatggattagggccccgaattgtggtgcttggtgaggatcagccataggaggcaccttcaagggttactaaggaggtcttgttactagaggttctattgaccattctcagtgccctgaggttccgatgttttaccctgtactttggtgaacccagggagcagagtctctgacttcagtccttggagaggaaataaaaactccgcttagctaatgcccttgtcttttcctttcctctaaggccttataaagccactctggattcctgaatccccaacctgggacattaaagatcctttctatctctctgagttcctcctatgagcggtgttggtggcacatcagtatagtttagactctgatggcctgggctttgggagagaaaatctctttcttttttccttggcgttttttgatcctaggacacagcaagaactgtttccatagcagtgcctctggccagcccagggtttgtagggaatccaattggctcagtgtcaggcatcacttttccttatgcatgtgaggagtcccaaggatgaggctggctttactctcactaaagccatattccatcccaagattccacccagtttatatcaggagctgctgtgtggggagaggtcaattctttctgtatcctgagacctttgagggttacgcagagctggttgcttggtgccagtgggttaatgtcttgatatcatcactccaatccccagcaccaagtctactcttgaaggcattgtgtctgaaagccagggctcttttaaagtaatttaaacatatgtttgagatttgtgtctcatttaaatgggacgtattagaatcatttctgaaacagtaaaaaaaaagagcatggttatgcacacacaaacacagacacacacacacacatacaaccaaacacaaccacacatacaacacacacaaccacacatacaagacacacatactcccacacacttatgcctgtaaacacacatacaatattctaccactcatgatgctgagctagtaggatcttgagtttcagtctagcctagggtatatccaaagataccttacccaaaaaagcattcatatacaaagataaagcaaaacaggctttccaccacatatgctagtgaatattatattgggttaccagccagtgtaattaaaaaagaagaatttaattagatgtgtaagtgtgagaaacatttttgtactggttccctagagctcagtgcaagtcctgtgtaggcaagttagagctagggtgtatgggatatccctttctataaaaatagactttagacttggaggactgaagactacatagatttctcactagtgtcaagtcaaacagcattgcccagaacagaccctgaatcacatcccatcagcaggttgactgcacttgcatgtcttggtttttttccatggagacttaacaccatgtttctcatttttcttcctcatctgtatatggacatacagagcagacaaccgttcctgattatacaccaataggtaagaaaaattgtataaatctcgcactgtaggtcacaatgctgattgtattcacagcatcgacttccttgtaacacttaagggcatagggtggtgggtgtgtgctgtgaagacttagaggagttggggatgcctcctgatcctgaggacttccctcctgtcaaccctgtcactgtctgtatttctctgcctgtggaggggatcagtcagcctgctgtcgcttgacctttccctctccctgtgtgtggaagtcagtattggtgtgggttccaaaactccccggtctctacatttagtattatgtcagaagagactctggggttagagtgattaatataagacaaccttccagagacgttgggtgacaaaatgagactgatgacctcttatgagatgccattctgattcacttcaaatgggtgcccagttgtggaagctgtgtcttagtgctcactggtgcagatatttgtcgtgtttaaacatgttgggttgaaccttgactttaatgagaaattcacatcagtggtcttagtgaccagcagtgacaaagcttggggtcctctagtgtggtctcattgcagacagagagtgaggtggtagaggcattcatgtgacctgggacagcggggggggggggaggggaaccagcagctccctcaggtttataattctgcattgagcctgaatgcagttctgatataaactctccatcttgtatatgtaagcagttgtgagagcctttgcaagggaccatgaacttttgttgttgcatgaagctatcattctgcccctttggtttttcatagactaacctactccgccttctcctttactgctggcaggtgtggtaaggatggaggtgaatgtgcgcatgtgcaatgtgtgtgtgaggagtcgagagggctctgcatccccttctcctcaaaacacacttgattctacagtgcaggacactccaaggccttaggttcaaggtagagtaggtatcttgtcaccatccagggcagattcaacccatgccaacacagtgtgtagaaacctaggcatcctggtgaccaacttggtcctcatgtctaggacagaagtagtgacattgtagtgagggttcacagtcaaagtgagagggtacagatctttacaggacagtgtggccaggatgcagcagcaggaggtgttcatatcccatattgttcatgagtgagtggcccacaaagtgtacaaagctccatcacccacaatgaaccaacaatgcagaaaccaccatttcttcccaggaacagaaaacagtttggccgtgaggctggagaatggaggagacaggtgtcagggtcgagtggagatcctttaccagggatcctggggcactgtgtgtgacgacagctgggacaccaaggatgccaacgtggtgtgcagacagctgggctgtggctgggccgtgtctgccccaggaaatgcctactttggaccgggctctgggtctattgttctggatgacgtggcctgtacaggacacgaggactatctgtggagctgctctcaccgaggctggctctctcataactgtggacaccatgaggatgctggagtcatctgttcaggtataacccaaaagccatcagatattgtcttcaagactgtgcttttagatgtcactgaattctgttctctgtactctatttgggcttcatcaatagtgggactccttgtgcatttttgttgagtttttctcactcagagaactgtccaaaactttcacagctgtcttggaactctagagttccttggtgcagagctaggtccccagtttgaagaaacactggtgtcttcacatgctcactcttgtaagctttcccatagtatctgaaagttcttaggtactggttttaagatttagcatccagcaactcatatataaaaactataatccattattttacccgaggaacatccatttgactctacttctgtggtcccttacatcagtcatagagatagagcctatgcaggacacatgtgttgcagctcaccactttcttttgtttcatagtcatttgcgattagccataatcatcgtatgttagcacagtagctaacctaaagtgaatggctcatttactagtcaaggtagaaatctggatgacagagtaaggtataggcttcgcaggatggtgatatactttgtgctcatgaaccagccatattggagcagtgaagcaaggaagaccacatgttttcaacagcatcctcctaatatgagggtagtccgtgggtctccagcagctcatcactgagactaattttggatgattacctccatgcttatgcaaagaagtttgtagcctgttctagtggtagccattactttcttactccagataatgacttattggtactcaggtcccggctttggctgtggggtgcagtgtggatttcagtgagtgttatctaggtttctgggtactctggttacaatagaacatcagctctttgtgtaaaaacaccaactctgtcccccatgttagtctatgtggggtcttgttctcagtgtctaatctatcttctttatcacagatgcccaaatccagagcacaaccaggccaggtgagtcccagcagctttctatggaagatctctgttcttgggaatcccattttgggatacatactcttctctcgccactttggtattcagggggcactttcttatcccaaacccaagtttgcatcaaatatgttggtaggtagtggttgagacacttgcaactgaaataaaaacccacacatgcaaggatctttggcccttttatattcaagatctgtctgcaaatcgatgtggacattctttgaacttctgaaaccatcagcattatccaagtcactcccttctatttctgcaaagcccgtatttattactgcatggtcacctccccaccaacccgtatgtactgcatagttgcctccctatgctatgtgagatggatcaatgtggggaattgcagctggtatccagttgagctgaggtccgaaccccgatggtcataattcacctacatgacatggtcctggatctccggcccctgcctaaggtattacctcccacagcccccacaagagaagcatggtcaatagtcacataagaaaaggcccaagcttctgaccttcaggctaaactcctccccagttacctagcaacagtgaagaccataaaaagaggtgaccagccctcacctcactctcttactcctttgttcctttacctctcacttctcttacttctctcctcttccctttctctttgtcttctcttctctctcctttctctttgtcttcttctttcctctcctctctccctctttctccctctttctctctagccttcccccctctctccctctccccctctctcttctaccttctctatttcccctgaatttctataattaagctcttaaaccatagatagtctctgctccttcaagttctgctgcacactctggtcagtgttgggaacctcttcccctattccctctctcctacaaccctggtggctttatcaaagtagctcgggggggggggtgtccccaggcagggctgccccttggcttccccctgaagagtgggatagaggaatgcccacccagggatgagtggatagggtaggtagcagccctctcatgcctgactgaccagagaatagggaaactctggcaggacatgggcctcttttcccttcccccacttcccccagtccctcccctggttccccctttattttgttcccaacagatcaagaggcaaggaatgttttgtgattccagttgtcaggaaagacaattcttctatttactacactctattgcctttggcctctttctccactctttatctatctaaatctgggacatggcgtcacatgtacctgtcccatatttgggtccccaaatggacagacagagtttcttagacaaaagaatgtctcatagagaggtgggaaaacatccttatgtcctttgggctttgttctttgcatgaatatctgggttggacccttgtgcataagtcacaagtgctgctcttgaatggattctgcattgtgtggagaacattttgtgtgtgtgtgtgtgtccatttgtcttctaatcttacattctgttgccattttcagatctgtggcctactactactaccccagaaactacaacaggtaatgagtcttcttactgtgggctggctacctgtacattacaggttgaaaccttgactggctaataagagattaagatgaaggagtttcttgccttgcttaggatcctttgtgtttagtcatatagaaaggagtttcacaagctgctgataggttgttggtagagatccctattctgttcacagccacaccaacaccgacagagtgggtaggactctttcatatttgttctgccccagaaccttcagcattctccataaagtaccaagacagtatctgctgagcccacttcaccttctgctcgttttaggagaatcacagacttgcagcacgtagtcaattttgctaaacttaacttttctgtgaaatcatttgctatggtggtcctttcctatgacattttcctggaaagcatcatccttgcaagagtcatgtgacacggggccgcagagactgttcttgtcatgctcctaaagtctagatggcatgattcttttaccaaccaaccgttattcaggacaatgctatcattgccctagggcccagggtcacctcactggcactatgatggacacatgagagcatggtctgtgccaccacgtgcccttgagaaaagactctctgcttctcaggcacagtgcttctgtgtccaatgtttccatcttgctagcacagcgatcttgactacactttgatgtatagaccttccttctaatctagctttgttttctctctagaattgttgactacaactccttattttggtaagtttgggatgagaccaaagcatagctttcagcatttcaaccaagaggatggggaaagacaggaattctggaatcttcttgacgtctttgctggagcacagctcagaaagacaaggagaaggaatggaattagaaagagggcctgtcttccctgtgtacacccacagtgatccactctgtccacaaaatccatctcctacatactccattccagaattaacgaataggtttggaaagacctctcagaatgcaatcatggagttggactcatgagtgggacacaaaatcttcaatatgagccctcagtggacatttcctaacccattcagaacatcatggcattgctagaacagcaaggtttgggatgttgtaaatcagaatagcagaaatacgtacagagtctagagattctctctgttcatcagagagagtgataccatatttgcaaacacaggcacacttgaaataacccctgggataggtgccaattacacctggatacattgtatccaggtagcagagaatctgtaccactgggctaagagattggtacccacaatcatctgccagacaatgggtcaaagagactcaatgaacgattttccccacaatcatagaggacaccttactgtggctttgatggaactttcctaaggacggccattttccatccatccatccactgaaaaacctgcacctactcccacaaagaaaagccatgaggaggggatccagcatgttctcagaatatgaccagggctaggaactgcttgtgtcaattcccgtctctggttctgcattagagaaccctaagcacaaattccctcactgggccttgatataggtgtatgtttgcacagcttttcaagtactggggtggagtctgtgctcatggctataaatccctccagatctgtgcctcatgggcagcatgggaagagatatcctaagagacctgaatgctctattgtaagggcttggtttggacatggggtagtcatccataattcactgggcagacacaaactacaggatccatcctgtcaacaaatgcatcttcttgtgaggtgggagcagaatgtgagtacttaatgaccccatgagtagtatcttcctggcagtgagtatggccacacccttgctctgaggcagcagatgagtacaactcagactgttatgctcagcatcatgcacaaaggaccaggacgggtaacttctcttcaagactctgacatgacttctttttctcacagttccttcaaccatagctggtaaatcttgactcccttcaactcttctaatcctatccatacctactctggtcacagccatggccagcagctccagagtggctggaactaaagtaatctgtctgcccaaggaccttcccctctctctatagtacaaaggcagcatctcttgtgacagcctcattctctgcttaattcagtgggatatgagagttgcagcacttaatccatttggctaactgtcacttcctgtgaaacattttcccccagatgccctttcctatgttattcattctgaaagcattgtatcttgcaagattcacgagatattgggcaacagagactgttcctgccatgttgctaaggtatagacggcatgattcttttcccaagcaactgtcattcaggacaaagttgcagtgtccatgaggtcagggccacatcattgttaatatgaagtacacatgagagctcagtcagggacaccgcatgatctcaaggaaaggactttgttactctcagccacagtgcttctgtgtccacggtttcccacttctaaccataagtgcctggacagaatcctggtgcacaaaactttctctaatctagctttgttttcctctgcagattggtggacaactacttctggtaagtctgggaagaggccaaacttctctttcaagcacttcatctaagagttggaaagagttgggagttctaggatcttcttgtaatctgtgctggagcacagctcacaaacaagagaaacaaaagcactggaaagagggcctatctttcctgtgtctatctccagtgaagattttctgttccctagaaagactgacactcttatcagcaaagatatgcacacttgaaataacccctgggataggtgttaattatacctagaccccttgtgtccaggtagcagagaatctgcaccacttgtctaagagattggtacctacagtcacctgccagccagagagtcaaagaagttcaaggaaagcttttcctatgagcacaggagacagaagactgtggctttggtagcactttctatttttcatcctcccatccactgaactatttgaacctactcccacaaaggaaagacacaaggaaagaatcctgcatgtcctcagaatgtcaccaaggctaggttacctcctatctgttcctcccttggaattttggtaaatcctgactcttgcccctggttgtaacctgtgcagtatgatccagtgttcatcagcatttccacacttttctgtttgcagactacagctgtggaggtctcctgacccaaccctctgggcaattttccagcccatactacccttcaaactatccaaacaatgccagatgttcgtggaaaattgtgctccccaacatgaaccgcgtgacagtggtcttcacagatgtgcagtaagtgtgtgtgtgtgtgtgtgtgtgcagaggagatgttatagagaatagtggggtgctttgaaagttatgggatgatagtcatgttggcttttgcaatatgggttccatttttgatgtacaacaagagtctcccagggaggatgtaatgggtgcaaaagcacattgaaaatactctgtcttttagtcccagcttgtcatgaatttgcactatggccatgtggagccatgttctaaatcctcagatagaagaaaggggctggaatgcctgtttgcctcaccttgttgatcagcaagtgagcagagaatggcaacacacttggagaccttactcagtgggatggaaaggtggtggcctagggagtgacagtcttgggtgcacattaggacagtgctgctaatgagggtacctatttggtgcaaaatttccccacagctccttctcagtccatgaggcaccaggagcaggtcagtgcatttccagagtagtgagtaaggtcccagcacttattaactaagctgtgttcccaggcctcctcttggtgtctatagtggttttgcaagtctctgctgtagagctatgtatacatagtttcagtgtccttcttaggacgattcaagaggcacctgaggccatttggtcctatgcaggaggctcctcagtatgttcttgtcaggacactactgacagttagcggcacacagtagtgacattttatgaacccaccttactctccaaccttccctgctcctcctggtaatatagaattttgtcatagctcctttgtagtgtttctatgtgaacatggatttcagtattgctctcagaacatgagaaacttgagggtcagagagttccagggacttatcttgtggtgtttttaattttgttagatttttatttaatgtgtgtgggtgtatttttgtgtagatgtatgtctctggattgcatgtttgcctggtccccacacaggtgagaagaaggtgtttaattccctggatagtgaggtaatgacagtagtgagctctgttgtaggtgctgggaatcaaacctttagttctctagaacaacaggcagtgcacagaaccactgagccatctttctaccacttgccttgagtgtatgtctcccttttttatattcactagagatatttgttttatcccaaagataattgaggatttttgaaggaactaattagtgtgtcctcaggtgagcttcctgtgttgatgtaaaggctttcaaggagaggtattatggattacatatctgtgagcctcaaaggtagaattttacaagggatgctgggcatgggaagatagatgaattacctttggattccaggtagccatctactcttcaaatgatgtagttagtcactgttatcaggacaatggctccacagatgtgaaccccacatcacattccagacacagaaaagggtccttttccttttgtgtcctcaggcttgaaggaggctgcaactatgactatatcctggtttatgatggccctgaatacaattcttctctcattgctcgggtttgtgatggttccaatggctctttcacctcaaccggaaacttcatgtccgtagtcttcatcacagatggcagtgtgacaaggagagggttccaggctcactactactctacagtcagcacaagtaagttcccttgtgagaatgaatgtgcatgtgggattggggatgtcaaaagggactatctgagcctaagatttctgaatttgtgacaagggtaatagagtggtgccgtgggtcccatgcttgctgagagggactgtggccataagtcttggttctgacttggggaaagagaggctttggccagcactgactgatgggatgtacaatggctttcccgtcatcattagacactaaaagtccaaggtgattattcaacagatagtgagaagtcagtgccaggcatggaagatgccagcatggttggacctttatgacctttccaaagtgtgggacactggttaggtctttggatcaagcacattttgcttccatctgaaagagaataaaatatttgatatgaagattggcagaagacagactcagaggttgagttcttagtcagagacaccatgtagacctcagaatgtaatggagaaggactgaggactgatgtccaaggtcttttgttcagcaaggagcataagggtggactttgtcctgagctaaagacctgactggatgctgctgctactcttggctgtggagttgctttactgcacgtgaaaatgattactatgaaaatattttgctttggtcaattcctgtctcccattccccatcagagaagaacttagcacaagttcattctttgggccttgatgtccatgtgtgcctctgcatagcctttcaggtactgaggtagagtctgtgctcatggctggaaatccatctacatctgtgcctcatggcaagagtagctgaagatgtccttagaggccttaatggtcaaatgtgaggacttgctctttgcttgttgtagtcattcacccataaatccctggggagacacaaagtacaggatcttacctctcaacaaatgcagatacaaatgtctacatgcagtcagaatagactactgattcttaatgactccatcagaaggatcctcttgtattgtatatggttacacacttgcaatgaggcagcaggtgagtacaactcactctggcgtgctcagcatcatgcacaaaggaccatgacagacaacttctcttcaaggttctgtcaaggatttttttctcacagctcctccagtgccaatcccaaccgtagctggtgagtcagaacctccttcaactcctctctatcctctccacacctattatcaccacagtcatggccattagctccagagtaggtggaattccattattctagctaccctaggatcttcccatctctccataaagatcaaaagcagcatgtgttgtgacaacctcactgtctgtttgacctagtggcatatgagatttgaagcacttaatccatttgtctaactgtcacttcctgtgaaatgatttcctcctgataccctttcctatgtaattctttctgaaagcatggtatcttgccaaagccatgagatattgggcaacagaaactgttcttgtcaggatcctaaggaaaggatggcttgattcttttcccaagcaactttcattctggaaaaagttgcagtgtctctgaggtcagggccacatcatttttaatatgaagtacatatgagacctcagtcagggccaccatatagtctcaaagaaagaactttgttactctcagccacagtccttctgtgtccactgtttcccacttcccaccatgtgtgactcgagagaatcttggtgcacagaactttgtgtaatctagctttgttttcctctgcatattgatggacaactctttctcattgcatgtctgggaagaggctaaacttctcttttagcatttcaactaagagttggagagagttgggagtgctaggatcttcttgtaatctgtgctggagcactggtcatgaagacaagaggaaacaaggcactgggaagagggcctatcttccctgtgcccatctgcagtgacccactgtccaccctattccatctcctattcatttgatcagagatttaatgagtaggtttggaaacagcccacaggaggatctcttgtgtttgggattccatatcttcaataggaacctttagtagagaatgtctatccgattcagaatgccatgaataccagaagaaataggctttggatggtctaagtcagaatagcagagcagtgcttcttgtagatttgctgttctctagaaaaagtgacactcttaacaggaaaggtatgcacactttacataatcctgggataggtgttgagattggcacctacattcatctgccagccagggagttaaagaaattcctggtaaggttttcaccatgagcacaggggacagaagactgcagatgtgatagaactgtccattgttgatccacccatccagggaaccacatgaacctactcccaacaaaagcaggggtcctgcatgacctcagaatatgaccaaggctagctcatctcctgtctgtttcctcccttggaattttggtcaaacctgactcttggccctggtagttgtctgtgcagtgtgatccagggttcatcagcatttccacacttttctgtttgcagactacagctgtggaggtctcctgacccaaccctctggacaattttccagcccatactacccttcaaactatcctaacaatgccagatgttcctgggaaatattggtccccaacatgaaccgtgtgacagtggtcttcacagatgtgcagtaagtgtgtgtgtgtgtgccgaggagatgtgatagagaatagtggggtgctttgaaagtcatgggatgagagtagagttggcacttacaatacaggttccatttttgatgtggagtaagagtctcccagggaggatgtaatggctgctaaagcaaaggaattttaaaatacactgtcttaaagtcccaggttgatatgaatttgccatatagccatgggttgccatgttctgaatagtcagccagaaggaaggggctgtaaagcctgtttgttgatcagcaagtgagcagagaatgggaacacacttggtgtcctgacgcagtgagatggaagggtggtggtctagggagtgacctagggtcttgggtacacattaggacagtgctgctaatgagggtacctatttggtgcaaagttttccccatagtcccttcacaatccatgaggcaccaggagcaggtcagtgcatttccagagaagtgactaaggtcccagcactcattgactaagctgtgttccctggccctctcttgttgtctacagtggttttgcaagtctctgctgtacaactacctatacatagtctcagtgtccttgttaggacaattcaagagtgcacctgaggccatctctttctatgcaggaggctcttcattctgttcttgtcaggacaccactgacagtcaccagtacaaagtagtgacattttatgaagtcacgtcccacttcaaccttccctgctcctcctgttaacatagtattttgtcatggcttctttgtagtgtttctatgtgaacatggaattcagtgttgctctcagtatttgagaatgttgagggtcagagagttcaagtgacttgtcttgtggccatcttttattttgttaaatttttatttaatgtgtttgagtgtattttgtgtagatgtatgtctctggattgcatgtttgcctggtccccacacaggtgagaagaaggtgtttaatttccttgatagggaggtaatgacagtagtgagctttgttgtaggtgctgagaatagaaccactagtcctctagaacaacaggcagtgcacagaaccactgagccatctttctaccacttgccttgagtgtgcttcttccctttttatatttactagtgctatttattttattccaaagttaattggggagtttgtgaggaaaccaattaaaacatcctcgggtgaccttcccttgttgatgtaaaggctttcaaggaaaggtattatgcaatccatatctgtgagcccaaagatagaaatttacaagagatgctgggcacgggaaggtagatgaattacctttgattacagaaaggcatctagtcttcaaatgatgtagttagtcactgttatcaggacaatagccccttagatgtgtgacctcacatcacattccagacaccgaaaaggggattatttcttctttgtcttcaggcttgaaggaggctgcaactatgactatatcctggtttatgatggccctcagtacaattcgtctctcattgctcgggtgtgtgatgggtccaatggatctttcacctcaaccggaaacttcatgtccgtagtcttcatcacagatggcagtgtgacaaggagagggttccaggctcactactactctacagtcagcacaagtaagttcccttgtgggaatgaatgtccatgtgggattggggatgtcaaaagggactatctgagcctcaacttttctgacaatggcaatagagtgctactctgggtcccatgcttgctgagaaagattgtggcccatagtcttggttctgacttggggaaagggtggccagtacttactgatgggatgtacaatggatttcctgtcatcatcagacactatatgtcaaaggtgatttttcacaggtagagagaaattcagtgccaggcatggaagatgccatcatgcttggacctttgtgactttccaaagtgtgggacactggtcatgccttttcaccaagcacatttggtttctatctgaaggagaataaagtagtagatatgaagatggacagaacacaggctcagaggttgagttattagtaaaagttgcccgtagaccacacagtgtaatggagaaggactgaggactgatgtccaaggtcttttgttcagcaaggagcataagggtggacattttcctgagctaagacctgacttgctgctgctgctcctcttggctgtggagttgctttattgcacgtggaaacgattactggacaaaacattctgcttgtatcaattcctgtctcttgttccccattaaaaaatgcttagcacaagttcattccctgggccttgatgtcagtgtgtgcctctgcaaagcctttcaggtactgaggaagagactttgctcatggctgtaaatccatctgcatctgtgcctcatggccagtgtgctgaagatgtcttagagacatgaatagtcaaatgtaaggacttgcttttacttgtggtagtcattcacccataattcactgggcagacacaaactacaggatccaacctctcaacaaatacagacacaaacctctttatgtggtggggatagagtatggatccttaatgaccccatgggaaccctctttgtgcattgtatatggtcacacactttcaatgcggcagcaggtgaatacaactcagactgttatgctcagcatcatgcacaaaggaccatgacaggcaacttctcttcaaggttctgacatgaattttctttctcacagctcctccagtgccaatcccaaccacagatggtgagtcctaacctccttcaactcctctctatcttctatacacctattatggctacagtcatggccttcagctccagagtgggtgggactccagtatactgtgtgccctagaatcttcccttctcttcatatagtacaaaggcagtatgctttgtgacaacctcactgtctgtttgactcagtgggatatgagatttgcagcacttaatccatttggctaactgtttcttcctgtgaaacattttcccccagatgcccttccctatgttattttttctgaaagcattttattttgcaagattcatgagatactgggcaacagaaactgttcttgtcaggttgctaaggtatagacggcatgattcttttcccaagcaaccgtcattcaggacaaagtagcagtgtccctgaggtcagggccacatcattgttcatatgacttacacaggagagctcagtcagggacaaaacatgctctcgaggaaagtactttgaagtctcagcaacagtacctctgtgtatatggtttcccacttccaaccatgggtgccttgacagaatcttggtgcagaaaactttttctaatctagctttgttttcctctgcatattggtggacaagtacttcttctggtaagtctggggagaagtcaaacttctccttcaagcacttcaagtaagagatggagggatttcagtgttctaggatcttcttgtaatctgtgctggagcacagctcataaagagaagaaacaaaggcattgaaaagaggacctatctttcctgtgtccatctctagtgatccactcagtccacccatttctatttcctatttattagaccagaggtttaattagtagtatgagtagttttggaaagagctcacaggaggacctcatggggttgggattccaagtcttcaatatgaacttttagcggctactgctatcccatttcaataccatggcataccagaagacataggccttggttgctctgagtcagaagagcagagcagtgcttcttgtagattttctcttcttgaggaagagtgatactaatatcagcaggatatgcacacttgacataactcctgggatagaggttaactatacctagaccctttgtgtccaggtagcatagaatctgcaccagtagtctaagagattggaacctacagtccttcatattcaaggaaatgttttcctatgagcacaggggacaaagactggggaattgatggaactttccatttttgatccacccatccacggaaccacctgaacctaaccccacaaaggaaagacacaaggaaggcatcctccatgtcctcagaatgtcaccaaggctaggttatctcctgtctgttcctcccttggaattatggtcaaacctgactattgcccctggttgtaagctgtgcattatgatccagcattatgtagttcatcagcatttccacacttttctgtttgcagactacagctgtggaggtctcctgaccctaccctctggacaattttctagcccacactatccttcaaactatcctaacaatgccagatgttcctgggaaatattggtccccaacatgaaccgtgtgacagtggccttcacagatgtgcagtaagtgtgtgtgtgtgcagaggagatgtgttagagaatagtggggtgctttgaaagtcatgggatgaaagtagaatcggcagttacaatacaggttccatttttggtgtggaacaagatgtaatgggtgctaaagcacaagaattaaaaaatactctgtcttatagccccagattgtcatgaatttgcactatggtcatggggtgccatgttctgaatcctcagccagaaggaaggggctggaatgcctgtttgcctcaccttgttgatcagcaagtgaacagagaatgacaacacactggagcccttactcagtgggatggaagggcggtggcctatggagtgacctagcatcttggctgcacattagggcagtgctgctaatgagggtacatatttggggtaaagctttccccagagttccttctcagtccatgaggcaccagaagcaggtcagtgcatttccagagaagtgactaaggtcacagcactcattgagtaagctgtgtccccaggtgctctcttagtgtctatagagcttttacaagtctctgctgtacaactacatatacatcgtttcagtgtccttcttaggacaattcaggagtgcacctgaggccatctggtcctatgcaggaggcttcttagtctgttcttgtcaggacaccagtaacagttaccagcacacagtagtgacattttatgaagtcacgtccctctccaaccttccctgctcctcctggtaatatagtattttgtcatgttttctttgtagtgtttctatgtgaacatggaattcagttttgctctcagtatgtgagaaacttgagggttagagtgttccagtgactggtcttgtggcgatttttttattttgttacatttttatttaatgtgtttgagtgtattttgtgtagatgtatgtctctggattgcatgtttgcctggtccccacacaggtgaggagaaggtgtttaattccctggatagtgaggtaatcacagtactgagctttgacgtaggtgctgggaatcaaaccttagttctcttgaataacaggcagtgcacagaaccactgagccatctttctaccacttgccttgagtgtatgtctccttttttatattcactagagatgtttattttttcccaaagataattgaggacttttgaaggaactaattagtatgtccttaggtgagattcctgtgttgatgtaaaggctttcaaggagaggtattatggattgcatatctgtgagccacaaaggtagaattttacaagggatgctgggcatgggaagatagatgaattacctttggattccaggtagccatctactcttcaaatgatgtagttagtcactgttatcaggacaatggctccacagatgtgaaccccacatcacattccagacacagaaaagggtccttttccttttgtgtcctcaggcttgaaggaggctgcaactatgactatatcctggtttatgatggccctgaatacaattcttctctcattgctcgggtttgtgatggttccaatggctctttcacctcaaccggaaacttcatgtccgtagtcttcatcacagatggcagtgtgacaaggagagggttccaggctcactactactctacagtcagcacaagtaagttcccttgtgagaatgaatgtccatgtgggatcagggatgtcacaagggactatctgagcctaagatttctgagtttgtgacaagggtaatagagtggtaccctgggtcccatgcttgctgagagggactgtggccataagtcttggttctgacttggggaaagagaggcttcggccagcaccgactgatgggatgtacaatggctttcctgtcatcattagacactaaaagacaaagctgattattcaagagatagtgagaagtcagtgccaggcatagtagctgccagcatggttggacttttatgacctttccaaagttgggacactgattatttctttggatcaagcacattttgcttccatctgatggattataaattattagatatgaagatggacagatacagactcagaggttgagttcttagtcagagacaccatgtagacctcagaatgtaatggagaaggactgaggactgatatccaaggtcttttttttatttttagcaaggagtacaagggtggacattgtcctgagctaaagacctgactggatgctgctgctactcttggctgtggagttgctttattgcacgtgaaaatgattacttaacaaaatattttgcttgggtcaattcctgtctttcattgcccatcagagaagaacttagtacaagttcattgtctgggccttgatgtcgatgtgtgcctctgcatagcctttcaggcactcaggtagagtctgtgctcatggctggaaatccatcgacatctgtgcctcatggcaagagtagctgaagatgtccttagaggcctgaatggtcaaatgtgaggacttgctctttacttgtggtagtcattcacccataattcactggggagacacaaagtacagtatcctacctctcgcaaatgcagacacaaatgtctacatgcagtggaatagaatactgattcttaatgatctatgggaagcatcttcttgtattgtatatggttacacacttgcaatgaggcagcaggtgagtataactcactctggcgtgctcagcatcatgcacaaaggaccatgatagacaacttctcttcaagattctatcaaggatttttctcacagatcctccagtgccaatctcaaccatagctggtgagtcagaacctccttcaactcctctctatcttctccacacctattatcaccacagtcatggccttcagctccagagtagctgggattccattattctagctaccctaggatcttcccatctctccataaagatcaaaggcagcatgtgttgtgacaacctcactgtttgacctagtggcatatgagttttgaagcacttaatccatttggctaactgtcacttcctgtcaaatgatttcctcctgatgccctttcctatgtaattctttctgaaagcatggtatcttgccaaagccatgagatattgggcaacagaaactgttcttgtcaggattcaaaggaaaagatggcttgattcttttcccaagcaactttcattcaggaaaaagttgtagtttcccgaggtcagggccacatcattgttaatatgaagtacacatgagacctcagtcagggccaccatatggtctcaaagaaagaactttgttactctcagccacagtccttctgtgtccatgttttcccacttcccaccatgggtgcttcgagagaatcttggtgcacagacctttgtataatctagctttgttttcctctgcatattggtggacaactctttctcattgcatgtctgggaagaggctaaacttctctttcagcatttcaactaagagttggagagagttgggagtgctaggatcttcttgtaatctgtgctggagcactggtcatgaagataagaggaaacaaggcactggaaagagggcctatcttccctgtgcccatctgcagtgatccactgtccaccctattccatctcctattgatttgatcagagatttaatgagtaggtttggaaacagcccacaggaggatctcttgtgtttgggattccatatcttcaataggaacctttagtagagaatgtctatccgattcagaatgccatgaataccagaagaaataggctttggatggtctaagtcagaatagcagagcagtgcttcttgtagatttgctgttctctagaaaaagtgacactcttaacaggaaagatatgcacactttatataatccctgggataggtgttatatccagtcactctgtgtccaggtagcagagaatctgcaccactactctaagagattggcacctacattcatctgccagccagggagttaaagaaattcctggtaaggttttcaccatgagcacaggggacagaagactgcagatgtgatagaactgtccattgttgatccacccatccagggaactacatgaacctactcccaacaaaagcaggggtcctgcatgacctcagaatatgaccaaggctagctcatctcctgtctgtttcctccttttgaattttggtcaaacctgattcttggccctggtagttgtctgtgcagtgtgatcctgggttcatcagcatttcatacttttctgtttgcagactacagctgtggaggtctcctgacccaaccctctggacaattttccagcccacactacccttcaaactatcctaacaatgtcagatgttcctgggaaatattggtccccagcatgaaccgtgtgacagtggccttcacagatgtgcagtaagtgtgtgtgtgtgccgaggagatgtgatagagaatagtggggtgctttgaaatcatcggatgagagtcaagtcggcatttataatacatgttccatttttgatgtggaataagagtctcccaggaggatataatgggcactcaagcacaggattttgaaaatactccgtcttaaagtcccagattgacatgaatttcctatatatccatggggtgccatgttctgaatcctcagctagaaggtaggagttgtaaagcctatttgttgatcagcaagtgtccagagaatgcgaacacatttggagcccttactcagtgggatgaaatggtggtggcctagcgagtgacttagggtcttgggtgcacattaggacagtgctgttaatgagggtacctatttggtgtcaagttttccccatagctccttctcagaccatgaggcaccaggagcaggtcagtgcatttccagagtagtgagtaaggtcccagcactgattaactaagctatgttccctggccctctcttggtgtctatagatgttttgcaagtctctgctgtacaactacctatacatagtctcagtgtccttgttaggacaatttaacagtgcacctgaggccatctggtcctatgcaggaggctcctcagtctgttcttgtcagcacaccactgacagttagcagcacacagtagtgacattttatgatgtcacctccctctccaaccttccctgctcctgctagtaatatagtattttgtcatggcttctttgtagtgtttctcagtgaaaatggtatacagtgttgctctcagtatgtgagaaacatgatggtcagagagttccagtgacttatattgtggtgttttttattttgttagatttttatttttttgtgtgtgactgctttttgtgtagatgtatgtctctggattgcatgtttgcttggtcaccacacagatgataagaaggtgctcaattccctgcatagggaggttattacagtagtgagctttgttgtaggtgctgggaatggaatctttagtcctctagaacacctggcaatgcacataaccactgagccatctttctaccacttgcttgagtgtacttcttccctttttatattcactagagatgtttattttatccctaagataattggggactttgtgaaggaaccaattaaaatgtcttcaggtgactttcctgtgttgatgtaaaggctttcaaggagaggtattgtgcaatccatatctgtgagccccaaaggtagaaatttacaagagatgctgggtatgggaaggtagatgaatttcctttggattccagaaagccatctactcttcaaatgatgtagtttgtcactgttaccaggacaatgcctcctgaaatatgagcccttacaccacactccagacatagaaatggggactgtttcttctgtgtcctcaggcttgaaggaggctgcagctttgactatatcctggtttacgatggccctgaatataattcttctctcattgctccggtgtgtgatgggttcaatggatctttcacctcaaccggaaacttcatgtccgtagtcttcatcacggatggcagtgtgacaaggagagggtttcaggcttactactactccacagtcagcacaagtaagtttccttgtgagaatgaatgtccatgtgggatcgggattgccacaagctaccatttgagactcaacatttctgagtttctttcaagggcaatagaatggtggtaccctgggttccatgcttgctgagagggtttgtggccagtaagtcttggttctgatttggggaaagagaggcttgggccagcagctgatgggatgtacaatggctttactttcgtcatcagagactaagaaagcaaaggtgattgattggtccacacagagtgaaaagttaggaccatgattggtcaatgacactgtgcttggacctttgtgacctttctacagtgtcggactctgcctatgcctttggaccaagcatatcctttatctgtctgcaggaggataggttatgggatatgaagatggacagatcacagactcagaggttgagttcttagagatgtcatgtagacctcagagtgtctatggagaaggactgaggactgatgtcccaggtctcttgttcagcaaggagcaaaagggtagtcaatgtccttagctaaagacctgacttgatgctgctggtagtcttagctgtggagttgctttataactcttaaaaatgatcatttggcaaaacattttccttttgtctattcttgtctctggttccccatcagagaaccgaaacacaagttccctttctgggccttgatgtagatgtgtgtctctgcctagcctttcaggtgtagggtctatgttcatggctatacatccttccagatttgttcctcatggccagtgtgtgggagaatgtcccaagagagctgggacattgatttggatttgggttagttacccgtaattcactgggtagacacaaactacaggatccatcctgtcaagatatgcagacaaacatctccctgtgaagtgggagcaggatatgggtccttagtcactccatgggtagcatcttcctggcattgtgtatggtcacacacttgctctgaggcagcagatgattacaactcagtctggtgtgctaagcatcatgcacaaaggaccaggccaggcatcttcccttcaagactctgacatggattctttttctcacaggtcctccatcattcccaaacataactggtgagtcctgacctcctgtaactcctctctatcctcttcatccctattctggacacagccacagccaacagctccagagtgctgggactccagtcttctgtctgccccaggaccttcaacactctccatatagtacaaaggcagcatgtattgagtcagcaccatcctctgcttgactcagtgtcatctgagaggtgcagcacttaatccattttgctaaacttcactccctgtgagaattgctatggcggtcctttcctattctgtttgtctagaaagcgttgtcttttgcaatcgttatatgacatagggacggagggtactgctctttctagattcctaaggtatagatgccataattcttttatcagttatgtcattcatgacaaaatacctcattgaccacttgatggaaacacctgagcacggttaggaccaacccttgctgtcaagttacggacagtcttttattcagcttcagtgcttctgtgtccaatgttatctgctcttaaccagagtcccttaacagacctcgatgcacaaggcttttttctaatctgttttaattcccacccccccaaccccccagattgttagcctacaatatatccttcttatgctaggtctgttttcagtatgtcaaccaagagtttagaaagagacaaaatattctgggatcttcttgaagcctgtgctggagcacagctcagaaagacaaggagaaagaaagaaattagaaagagggcctatctttcttgtgtatatctgcagtgatctagtctgtccacaaaaatctatcttttatttacttcatcccaggactaataaacagatttgacctgagtccttgtgaggctggactcatgatcaggacttgaggtctttaatgtgggcctttgctggacacttcctgttccagtcagaaccctgtggcattgccagaatacataagccctggacgctgtcatttggaacagcagaaatattgtagtacatagtgcttcctgtagattttctctgttctccagagagagtgacacccatatcagcaaacacgtgtgctcctgagatagcccctgagataggtttgatagcccctgaagattctttgtgcccagggtgcagaaactttgcaccagaaatctaagggattggtatctacaatcacctacccactgaggagtcagagactcaaggaaagcctttcaccacaagtacaggggacacctgactatggcattggtggaacttacctaatgactaccactttatctcaggaaatgattcttcattggcgctgaggctggtaaatggatcaaaccggtgtgagggccgagtggagatcttgtacagaggctcttggggcaccgtgtgtgatgacagctggggcatcagtgacgccaatgtggtctgcagacagctcggttgtggctctgctctgtctgcaccaggaaatgcttggttcggtcagggctcagggctcattgtcctggatgatgtgtcttgctcggggtatgagtctcacctgtggaactgtcatcatcctggctggcttgtccataactgtcgccattctgaggatgcaggagtcatctgtgcacgtgagttgggtggaaccctctactgtcttcttccagtatgaacgttcttcttatccttggatctcacccctcagtgcatctgtctctcttataaactgaaactgcctcatttctttaccagtagtgatttttcacctccttcaacaaggttggttgtggaaattgtcactggaaacccacacctaggctttggtagaagaatcaagaagaaaatcacaggcttcagtgctttttctaccatggttgagttctatgggaacagggggaactgtagtttatagactggaatatactgtatcaatgagcatacaccacttcaaagtgttttcaggggaagtgtggtttcctcagaccatagcagttcccaaggtttctgaatgaggcctattggttggcactgtgaatatgagtatgtacagagaaatttttaggatagagatgggtatctatatcctacaaaagaacaccttcaatttttctaactcaagtctatttgattgggattaatccaacactgaaaactctacgctaactttaacccaacagaaaatctaacccaaaccctatcctgaacactaaccctaacccaaaccctaatccccaaaccctaaccctaactccctaactctaaccctaatccaatataaccctaacactattccaatcctaacattaacactaacactaatctaaccctaatcctaaaccaaatcctaaccccctaagcctaacccaaccctaatcctaaccataaccctaacccaaccctaacactaacccaaaccctaaccccctaaccaatcctaaaccaaatcctaaccccctaagcctaacccaaccctaatcctaaccataactctaacccaaccctaacactaacccaaaccctaacccaaccctaaccctaattcaaaccctaaccccctaacccaaaccctaacccaaccctaaccccctaacccaaactctaacccaaccctaaccacctaacccaaaccctaacccaaccctaaccccttaaccaaactctaacccaaccctaaccacctaacccaaaccttaacccaatcctaaccctaacccaactctaaccctaaccctgaggcctagatggttccatgtaaaaatttgtcctggacaaggccaattaacatctgaatcactgggcagttatgaaatacaaagttcagtctattaccttgtccagacacatttgtcaccttcttccagaaggtggaatactagttgagcctcacaaaaaaaaatcttcctatgagtatagatggctatcaatttctacttggtggtggggggtgagcagggcttaattcaaagtctgcccagtgtcacccgctcaggttccagattagtcaccttctgatctaacatggcttctttttcttacagtccctgaggtgacttctcccagtccaggtgagtccaggtgtcctttaattcccatgtgtccctcttttctttgcgctgctcacaataccaggcagtagctacagagtaggtagggatcaaagaaatattgctgccccagaaccttctgtgttttccttagagtagaaaagtaccttccgaggagctcgcatcaccctctggcctgacccagtggaataagaatgttacagtaattaatctatgttattaagcagtactttcctgagctattgggatctattctggtcaaagcattgtcttatccatgcattgtgtgttagggggcacctgagagttctcatgacaacatttaggagagagttaaagttgccagcaggtctggccaccttactatccccaaggtgggcatccctgagtgtggtctagggtattcctggctctgtataaaacgagtccctgcctcccagccatagtgacttcctggctcctgcaccccatgtcccagccacactgggcttcacccttgattcatgaaatctcattctaatccagctttgtttccctttctaggttggtggactacaagtccttcctatggtaagtattttatttcttatctgtggtgggtcaaaaatgagagggaagagagagagacacacaggcacacagacacatagacagacacacagagaatatgtagagggagggacaggcattacagccaaggtatatgtttctaggggatgtccccagtgacctattttattcaaccaggccccattacccaatgattattctatattatcaaacaattaatctataaatctgctcaaagctctcagcatacagtcacaggattggatttatgagttggcctccacgtctttaataatgacattattagtatatgtttcaaatctaacccataatactatgtctctgcaagagggtaacagcatttgactccgtgaactggataggtagaaatagctatgtagtcatgttccttgctctagatgtctgaattcatcagagagattcaacacccctccagcaaactcaaagatctttgggaaaaaacccaaggtgggggctaggaattcctttgcatccagagtccatggacacagatacaagtggcctatttctcaccattgtctgccagtcagtgagagcaagagtttactggcttaaccaatgaactccaggttcagtgaaagatcccatttcaaaacacatatctgtgttatccccaactactgatgaacattatgtcacacacacatactcacactcatacatatactcacacacactcacatacactatcacacacacactcatattcacacattcacacacatatattcacacacacagagtgtgtatatgtgtgtgtgtgtgtgtgtgtgtgtgtgtgtgtgtgtgtgtgagagagagagagagagagagagagagagagagagagagagctctaggcttcaacgagcgagccagggccaggctaacttttattgggttccttaagcatttctccccatgccaggcaggtgtgcagtgtgttctggggttcatccacgtttcccctctttcttgacagtaaactatacttgtggaggtttcctgacccaaccctctgggcaattttctagcccattctaccctgggaattatcctaataatgccagatgtctgtggaacatcgaggtcccaaacaactaccgtgtgactgtggtcttcagagatttgcagtaagtgtgggtgcatagcagatgttagccaatgtggggtgcctttgaaattcctgggggtgatagacaagttggcatttacaatagaggttacatgtttgaagtgggataagagtcgcccatggaaggcggtgaatctgtgcaagatcacatcagaaaatactctggcttaaagtcccagggtgtcatgaatttgctctatggccttggggtgccactttcctaagcctcagtcagaagaaggggctagaatgcctgctctcctcatatcctcatcttgttgatcaggagttcaccagagcatttgaaaatacttagagtaagccgattgtggtggtgcacgcctttaatcccagcacttgggaggcagaggcaggcggatttctgagttcgaggccagcctggtttactacagagtgagttccaggacatccagggctatagagagaaaccctgtcttgaaaaaccaaaaaaaaaagaaagagagaaagaaaatacttagagtattctcagcaggagggagggaggatctgtgacttgggtaatgacagtcttgggagcacaatataaaagtgtgcctgtcctgtgcggacctttcctcatcgatcccttcctttctgtgagtccccaggaaccagggtgctagtatcaactgctgcatttggcaccatccatatgcttacaaaggaaaatgttcttgagcagggcgacatctacaagagctcactaatatacacaacattccgggaggcgagtggcccagatggccaagaaaccatgccagttttctctagcaccccaagagcagtgtccactgcttgtgaccttttatgaactatgttttccccatgcagtgctccgtgtgatactatcagcaccctcttcggtatacatagcgcacagtgtctatcttagtggctgagagatctgagcattacagaggtccagggtttatttctttctctgttcacccccaccactctgatgtcattggcacttgttttattctggaagggacctggaagcactttgaaggaacaaatcaagatttctcttgtgaccttcctgtgttgatttaaagggcagtcagggagagagattatagatctcttacatgtggccttagagggcagtacgaagacaagccatggcagtcttggcaagatgaattcccctgggtttaagaaaatcctctttcccttcaaataatgaacctggttagggtctccatggcaaaggctcctgaggcctgagcactcatcaattgctccttttgtctctccaggctggaaaggggctgcagctatgattatatagagatttttgatggcccccaccacagttcacctctcatcgcccgggtttgtgatgggtccctgggctctttcacctcaacatccaacttcatgtcaattcgcttcatcactgatcacagtattactgcgagagggttccaggctcactactactccgactttgacaataacaccaccagtaagtttccttgttagaacaatggcttattaggactgcaggtgccactgagagcctactgctcctgtattttcttggggacataaaatattagatttctctgtaacataaaatattagaacaaccatggcccctatgattgagttcatgcactgtcaattgagagagactgtgtggtgagtcttggggctctggatgtctaaaagagtgccaagggccagcattggctgatgagagttgtcctggccttactgtggttggcaaagaatataaaggtataagatgatgttctcaatagacagtgagaaggcagtgccagaaggaattgtgggtgacaccaggcttgaaactttaggaccctcccagagtaggagtcactggccatgtcctgagacctaatacatttggcttctgtctgaagatgggtaaagctggacatcttaacagaggtggactactgcaacagaggctctatggatccagtttgagatgctatatgaacctatatctacattggtgaagggctgagcctggagagaaccatggtctctagccggtcagcatcagaggcatcaattttctccttagctaaagtacattacctaatgctatcattactatcttattgtacagttgctctccttcatgggagaatgctaacttggcaacaaatgttttggatatttaaaaatcttatcagatccacatcagaaaatcctatacctctaagtgccctcattgggcattcctgagatgaggttgagtgtagccatagggtaccctcggagccatagtgactctgttttgagcatgagtgttatgtgtgaaccatgtgagtcagccatcctgatctgcgtttctttagctggggaaagaccctcatgagggttgtgggtttcgaatcctgactctgtctgctctgatcttgcccttcagatctcctttgtcagtcaaatcacatgcaagccagcgtgagcaggagctaccttcagtccatgggctattctgccagggatcttgtcattcctggttggaactccagctaccactgtcagccccagataacacagagggaggtcatattcacaattccctacacaggctgtggcacaatcaaacaggtaagcctggcacggcccactctatttcccactgagcatgctttctttagtcaaaaatgtgtgtgtgtgtgtgtgtgtgtgtgtgtgtgtgtgtgtgtgtgttttagcatgcctctgcatgcatatggaggtcaaaaagcaacctatgggagttggggttttccttctaccatgtggatcgtgggactagaactcagattgttaggcttggcagcaagttcctttacccactgagccatcttagcagccctgagcatgacttatcacagtgatggctgccacgcttctagaaccctggagatctacaagttatggctgggatgtaatcagaacatcagaatggagactgaagcctctggtacagtagctatagctacttctaaataggaggaatgcagaggaagaaaatggggaattccagtagtgtccagcagagggagcactcagcaggcagccgctcacacagctcccagaagcttgagagttttcagaagaagaatttttcttatggtttcatttgggatgtgtcaaagaagcagaggcccctaaaccaaagatacaaatacactttacatagctaaggtctacaacagccatcagctgttaaatgcgttgttatgcctttgaggaagccagtgccctgctgagactcacactcacttagttgccacagttgccatttcttgagtgatcaacaggagtggtggtggtggggcaatgctttgacatcatactatgacattgtcgtctacaaaattcataatggagtactgaatattgacttacaaaagcatgtaccctgcttggcattttgagtagtgtggcccatgggccatcatggtttagacaggactagtagagtggtcacccatcttgatttgcttgagacttggtgattttaacatagactgccctgttgtcatcctgtcagtggaaggcactgtgctgagtccatgttctacttccaaaatgttattttattattttatgttttgaagcaaagtttctccatgcagttcttgatggttatgtagaccagatttggctttgaactcacaaagatctgcctacctttgtctcttgaatcctgggattaaagactcacaataccatgtctggctatgcccaaattcttaacaagtactcttgtattgtcagtcccactttagaagtgaggaaattgaatgaagagagatcaggcccattgaccaaagccatgtagaccaataggatagggctgacaccacaagtcaagactctcagaaacatcctgctaagaaaaagaagccaaacacagaagagttagacaaaaattctatgtatatcactattagatagaaatgtgccattcatgctaaatttagcaaaagagaatgactgtgcaataggaaaaagggtttcatgggtggcctgcttctaggttagcaggatggagatggttgggcaatggaaaagtggtgtgtcttactatggtggtatgtacaggacagacaagttcagatgcctgtaatgcagcagatacgtgataagcatttgccatatgccaggaactgtgtggagggctacagggcattccttcccgttcctctgacacacagtacacactgagagaggaactgggcactcagccaataaggcgggccttgggtcatccctatgactgtgatccagatctcctggtgagactctaaacacccaggagttccttcagaacttagtgggtgagatgagctactcacagagaagaatgcgtatcagccaggcactgtgtgaagggctacggattccttccgcttcctctgacacacagctgggtttgttattttgctctttaagttaaacatgtcacctccagcctttggtgagtcggccactgaaggtgattactgctccttttttcaaatgtgcagcccggagaatcaagcatctcagaagcttgctggtggcacttcatagatcactgagggcatctaaccagcgtgccagccctgcctgttctaactggaatgagcctgggtagcacttgctgcattcttgtctccccacttatgaaacagctgcagaacctatcaaactgagtgcttcagaggcagggctaattttatttacctttgccatccttggtgttctggtacagaacccaagactttatgatagtatcaacaactattatgtatggcagggcactgaacggagacttctacatgacttataaaagtctcaggaagccttttatcctcccttaatcacaggagataaaaaaaatcttagagaaactgagccaagtatccagggacacatactcaggaactgtggagtcagtgtgctctgtagcaggctatttatggcttcgtcaggctgccacacactgggaaggtgatgtgttggctggtgtcacagaatggatgagctttctcacagtgaaaggcatgccaggacactgagaacccaggtctctcagtagattcacacataggactttctgtcacattggttgtgtttctacctaggcagatgcctaagaagaattttaatctagagtcataatggccccttccagtcaagaaataagttttcattctgtgcttactgtttagagaagattcagaactgagctctgtcacagagagacatatatggacttcatgtgtaaactcatgttaaatataatttgagagacatatgtggtttgtaacaccattggtaccaaaatatgaatggttaaaaactttgaagaattcacagaagaaatacagtatgcttcccctgagaacttggaaagcaaaagttctgtctgttggttcttctccagacctgggtctggagtgcaggctctgatgccctctgtcgatcaggctggccatgccctaggctctggtcagtctgtggagggaacgatcaggctagagaagataaaggaagagtcaacaaagttacccccaaagctcttgtcttatgtttagattacattacatgcagagtagagttctcaacaatagacaagaagtagaaaggtctttatcctggaaaaaaattaattatatgtaagttgcatgagtgcactggcaacaaatggggccttgtccaggtcccaaccaattagaacagagcttcaccattcacagctggcatgactagagtggaaaacactctcttcatctgtctctgtttcccccctcccccatgtgtgtctatctgtctgtctctgatctgtcctgccctgccatacctttttttttccactatgaagagtacaattgctttaaattctggatagtgtccacgccacccttctattattctgctcttacaacatacagggctctaagcataagggactgggagaagtgggtcacagcactcaggctgtgaagagccccactggtgcacttgtgcttacctctctggagccagagtcccgacatggtgcttccaggaattactgttcacgtgtgtcctcttggccactgggctatacctccctgccacaccctttgtttatcgtagtactccccagacgctcccttcattcatgtcaactgcttcacagactcctacagatgctactgatgctgctgttataccaagaaaaaaaagagaaagagacattgttggacaccaccctttccttgagatgctcacaggccccaggcataaggctatcagcaaggctcagaaggtggcagatacagtaaatggcgcaagacaccagcctccttaggagtttgccacccagtggaagtcacagtggtgaatcattccataacacaatgacataaggcaggcatgggctcagggttgctatgacctcattcagatgttcacagaggctctggggaagtctcaaccccaggggtcaagacctgcttcagttataactgcaaactccatggcttgaaaattccaccgtgccaatcaccacactgagaaagtcaccagtcactcaaaatagaaagcatcctatgctggtactaccaggcccctctcataagtatgagaccaagattttgagaatgaataagctcagaatatgctgctctgagtcctgaaccatggagtctgagcttggtcagatacacttcaggtcaggggccatccagaaaccctagatttgtcacaagcaaaagcaacaagtgtggattatcatggcctctaccaccatgtgccagagaatgtgggagagtcggggagagtttgctggctaagctgatgctattaccattctaggtaatagcagccacagtgcagacaggtgccttctctgtaggattctgcaggagtctgactgtgtcatctccctctctctaaccagcatccctgctgactctatctgctttcacctactaggctgacaacgagaccatcaactactccaacttcctcagagcggttgtttcaaacggcatcatcaaaaggagaaaggacctgaatatccacgtcagctgcaagatgctgcagaacacctgggtcaacaccatgtacatcaccaacaacacagtggagatccaggaagttcagtatggcaatttcgacgtaaacatttccttctacacatcctcctccttcttgtttccagtgaccagcagcccatactacgtggatctggaccagaatttgtaccttcaggccgaaatcctccattctgacgcctccttggctctgtttgtggacacctgtgtggcttcgccacatcccaatgacttctcatctttgacatatgatctcatccggagtgggtaaggacttctgtgtgggatagatgccaacttttgctttataactcacacattagtagccaaaaagctcagggaatgaagatttttggctaactgaacttcccacaggtttgggtttagagacttttctccgtatggcttttgcctttgtggaaccctcacactgtcccctgagtcacatttctgactatggggatgggtaactaggcaccatttcttgttaacatgtgggacgagaggaacgacttatcaacggtcattcaactagtcggctttaaactggggttagatcttcagtcatcaaactctagtcttagggttaatcactgatttgagagcagatccaaactaaaatatctaaatctctgggtcagtttctgcaccccaagttaactggagatagtggcaagaagtaggtgtttggaagtttaaatgagaaagatcactttattctcaccagatgggttactgcagcaaaggtacacatgagcctcacatcctccatccattagaaatgcaagttgtggctcaggacatgttgaggttgaaccactggagaccaggttggctgccctgatctcctcggctctaccctccctggaggaggctctttggggaggtgtgatgctcctacactcttggaggaggcctgacatcctgggtgtacaagcccagttcccagtgtgtaatctctgctggtgggcatggtacttcttggcttctagtatggcccttggcacctcagtacccatcgcctcccatgggactgctgatagtaattatggcagtaggcttgaatctcacaccagcctgagacaccaaagaagacagcctcacctcctaggaactatttgaatatgaatatcagttcagcaaacagactgaaaatcatcttgtccaatctgtctagttgatcctacttgagtctgcccagttggaggcagcaaacaggagaaaacttacctaggcccttcttgctctaagttgtaactgtcttagttaaggttatactgctgtgaacagacaccatgaccaaggcaactcttataaggagaacgtttaattggggctggcttacaggttcagaggttcagtccattatcattaaggggagcacagcagcatctagacaggtatggtacaggcattgctgagagttctacaccttcatctgaaggctgctagttattatgaagacttcagctaggaatagggtcttaaagcccatgcccacagtgacacacctactccaacaaggccacacctccaaatagtgccactccctgggccatcacaacaaccaagtagtttctctgaatggatatggaatgactgaagtggatgcaaaccagtgagcaattagtttttctctgctaaaggttctttctctactctggcaacattttgccatatctgtggccatgacatttgtaatgccaactgagcctagagcatagggactcactagctatggctggttagttccctcaccccagccctcatcctcatctccacccctactcccactccagatctttcaaatgccccagctctgaacaaacctccggctagcctttcacttggcatgctaatagggctgcagtaaagaaaaggagtctaggtatttcagggcagttgagttgatggtagaaacaggaaggaagctctgggagggaggaggaagaaggaaggttgacatgggactaaccctctgggagagccaggctgctctggaacagtccacctaggaagcacttcttttctgaagtcccaggcccattctgctcctctttcagcacatccccttcagccttgctattataagcctcacatggtttgacccctggagacagcctcatttgcttccacagtggaattccttaagtagattggccgggtggttttctttcattaccagcaggtgccggagggaagaggaagcactggatgctggagtagggtctttgagagaactcaccatcgtggagatgtggttacataagggcaggcctggtgagaggctcagcagagaggccctaggagtcaggggacagggaacacagaagatgttcagcttatatctgaatgtcaagcctagtgacaaggcctagtgacaaggaaagggaagaagaggccatctcctttcctttcctatctctggcttgctcttggattccaaaattgagtttccttctctacttccctggttgctccggcccactaaacttatcctcatggctggtgatttgcgctgtcaacatgctggtgaggcacaagagccgctgggacttatgtgcacacctcacaatgagtgtgtggaggcactgaaggctcaggcagccaaggtgacagtggaatgcaggggaattaaggtgggtccatgcttccacaagctaacaacttcctctccttacttccagatgcgtacgggatgatacctaccaatcctactcctcgccctcaccacgcgtctcccgctttaaattcagttctttccacttcctgaaccgcttcccctcagtgtacctgcagtgtaaactggtagtatgtcgagcgtatgatacctcctcacggtgctacagaggctgcgtagtgagatctaagagggatgtaggctcctaccaagaaaaggtggatgttgtcctgggacccatccagttgcaatcccccagcaaagaaaagaggagcctcggtaggtggttacgctcaaatccttccttccactggggcccatgattctagggagaagggggaatttgggatgctttttgtttatgttatgggccaacccaaactgcacacaagttgatgaattaggcctggttactgccttcccccaagacttaaggtcacatgtaggtgataggcaaaagatttgtgacctggaaggcttgattctctgggtttggagctcccagaatcctcagttataagctgagagggttaatgtctcttaggactgtcaagggcttgctaaagcaatgctcgttaaactgccatggtccttctctggtgcaagtccctggatgtttgatgaatgttctatagtttttgttgttaacataattgatggtaatattatgcctcaccacaatggtgacaggtgttttgaattaaccaatggatgggatgtggaaatgcaggcagcatggattggttttgactgctggaggttgggggttctagcacaaaaggggccattttgcttcccacctagacagggtggtaggtataataatttctgctgtgttgttttgttgctgtttgttttgttgtgggtattgactagaaaatgtccacagtgggactcctaggacttctgacctaggctggggccagatctacctatcttctaggtagggagatacaatggccagggtgacaggggcagagtggatttgttatattgctacaaacctacctctagaaaggggcaacagcaccaccccgtgggagccatctgtgatagctctctgtcttcatgccccatcctagccccaccccacacctggtcccagactcttctccattcattcattaactatttaccagaagcccattgtgtggcaggaaacacacaaacaggcacagtcagagcagacttgtatgcagtgcctctgatggggatggggctatgtagaataggacagtgggcaaatcgaggagccaggtggtgcctgtttctttttatacccaaagtcaccacagtggctcaggtcctggatttctttggcctgggactcttatcaccatttcccaactggcttaaacgccacaactctctcccttctcactcattttcagacccagaattgtcctcccaaagccaaggcccgagttcccactaaaaccccccctaactctcttggttgggaagacaacgggggtaagtctctctagaccaacactcagctgctacctgggatactggcagtctcagtttccccttctcctatctctttatccctccccactggaaagtcctgacaagggctaccctgttccttgtctcctcaaggtgcctttttctgactgtgtccttttcccaccccatcatcttgctctctgttcttcttcctcagacttggcagtggaggatgtgaagaagccagcaagctcccaggccgtctaccctactgcagccatctttggcggagtcttcctggccatggtcctggctgtggcagccttcacattgggaaggaggacacacattgaccgtggccaacctccaagtactaagttgtgaagtgaaacaacccagacattggctccacaagcacagattcccagaaaagatggaagacatgagagcctgacgcttggcacccagatacatggtgactaggattcccttagcacaaatgcttagccaagaacaatgagatggcaaagaagaaaggtgggggccaagttttcccaggatctacagactgaaggctaggaagaatgtcataggagaatgagaccagtgtctacaatcacaggcaactgtgagctgagcactggtggcagccatgctttctctcgctagactttcccttttccccatgtatagccaactttctccatctgtagtgtcgatgtcagctttttcttacaatactgcaatactgaatataaataatctttctcatggcaagtgtctgcgtggtcattgtctgtataggcttaccaacatactggattccctcaagtcaggcagacagcttcggtgacatggccacagaaatgataaaagggcaagggacttgctctgtggcttccagaaccttcaagagaatgatcaactatattcctccaagactcttcatctttccatttgtgtcacacagagatgttcagagctatgggctgggaagggccaggggagggtacccatgcctaggacaggaatcctgtttgcatgaaatctccaaggagaagaaatatgacagatgatcgtagaagataaagaaatgtagccaggtacccaggctggcaggccccagcttctaggtactgtgctggctatgccaacacagatcccaacaggtagctgctaggatgatcctaactatgaacatgttgctagagttaggtgagactccttgggaccaagggcaggagaagttcagctgccagcactgacgagagatgactgagagctgcccatcaccagccttgatgagatttcagctcctatgagagagctcatgggatagcacacacacacacacacacacacacacacacacacacacacacacaccctttcagcatgcagtggagcaaaaggccaggggcatagcttctggctttcattacccatattcatgtcccaggctggggacatcggggagaatcctgagggatcactctgtgtggggtagcctggaaaacaacagtagtagagtgaaatgtagacccagcctgtggctagatctgaacatatgtggacctgcttagagatctgtggctctatgttgggcaacaccctcaaatgtatgacagacacacagtgggtaaaaaaacaggactcagcaaatttgttttgagctgtgtcttgcttgccttccaattccttccaagcagaaaaggctcccgatcacactcttgccatcccagtggtggagacaagagggcactacagctcaacattagtgccttgttgttactgtacctcccttcctttctccctcccttgcttccttcttccttcctatatgaattgtgtacatatagatacttctctctgagagagaaagagagagagagagagagacagagaaagaaagagagagagacagagagacagagagagacagagagacagagagacaaagacagagacagacagagacagacacagagagagacacagagacacagagagacacacagacacagagacagataggagagagacagagagacagagggtgacagtgagaaagaggcactttgggtgtcttccttgagagctagctctccaatttacacaggtaggatctcacgctgaacccggagccaatcagttctgcgggtctagaacaccagtcttcaccttctcaagtgctggtttcagagacagctaccatgttccccttctttctccctttaaccatacaactattctgtgaatcttgacccacccagacttcacaagtggacagactccaggagggaagccaggtcattcttacttcatcaaggaagtttacagatctcaagtttccagactctggggcatctacaaggttccagcacatccccctctggtacaatggacacaccttaatgtgttcctcctcttcctcctccacacactcagagtcacacattccttccaagaagagaagatcttggtcggccccagcactgggtcacattgagtacagagtcggtggacacccctgaggtccctagagcactctccacgggatcttaggacctctggtgagtggaacacaacttctgccaggaggcaggttcgagcaccagatatctgggcaccttccctgcaagaggagagcctgcctgcaggagtgctctgaccactgaaattcaggagagagctagtctccctgaatagagagataacagaatcccaagaggaaaaagctctaaccagagacaactataacaactgacaccagagattaccagatggcgagaggcaaacataagaatcttactaacagaagccaagaccactcatcatcatcagaacacagcactcccacctcacccagtcctgggcaccctaacacacccgaaaagctagacccggatttaaaagcttatctcatgatgatggtaaaggacatcaagaaggactttcataactcacttaaagaaatacaggagaactctgctaaagagttacaagtccttaaagaaaaacaggaaaacacaaccaaacaggtagaagcccttaaagaaaaacaagaaaacacaaccaaacaggtgatggaaatgaacaaaaccatactagacctaagaagcgaagtagacacaataaagaaaacccaaaatgaggcaacactagagatagaaaccctaggaaagaaacctggaaccatagatgcaagcatcagcaacagaatacaagagatggaagagagaatctcaggtgcagaagattccatagagaacatcggcacaacaatcaaagaaagtggaaaatgcaaaaagatcctaactcaaaacatccaggaaatccaggacacaatgagaagaccaaacctacggataataggagtagatgagaatgaagattttcaacttaaagggccagcaaatatcttcaacaaaataatagaagaaaacttcccaaacttaaagaaagagatgcccatgaacatacaagaagcctacagaactccaaatagactggaccagaaaagaaattcctcccgacacataataatcagaacgacaaatgcactaaataaagatagaatattaaaagcagtaagggaaaaaagtcaagtaacatataaaggcaggcctatcagaattacaccagacttttcaccagagactatgaaagccagaagatcctggacagatgatatacagacactaagagaacacaaatgccagcccaggctactatacccagccaaactctcaattaccatatatggaggaaaccaaagtattccacaacaaaaccaaattcacatattatctttccacgaatgtagcccttcaaaggataataacagaaaaaaaaatacaaggacggaaaccacgccctagaaaaaacaagaaagtaatccttcaacaaaccaaaaagaagacagccacaaaaagagattgccaactctaacaacaaaaataataggaagcaacaattacttttccttaatatctcttaatatcaatggactcaattccccattaaaaagacataaactggggctacacaaacaggacccaacattttgctgcttacaggaaacccatctcagggaaaaagacagacactacctcagagtgaaaggctggaaagcaattttccaagcaaatgttctgaagaaacaagctggagtagccattctaatatggaataaaatcaacttccaacccaaagttatcaaaaaagacaaggagagacacttcatactcatcaaaggtaaaatcctccatgaggaactctcaattctgaatatctatgctccaaatgcaagggcagccacattcattaaaaaaactttagtaaagctcaaagcacacattgtacctcacacaataatagtgggagacttcaacacaccactttcatcaatggacagatcgtggagacagaaactaaacagggacacagtgaaactaacagaagttatgaaacaaatggacctgatagatatctacagaacattttatcctaaaacaaaaggatataccttcttctcagcacctcatggtaccttctccaaaactgaccatataattggtcacaaaacaggcttcaacagatacaaaaatattgaaattgtcctatgcatcctatcagatcatcatggactaaggctgatcttcaataacaacataaataatagaaagccaaaattcacatggaaactgaacaactcccttctcagtgataccttggtcaaggaaggaataaagaaaaaaattaaagacattttagagtttaatgaaaatgaagccacaacgtacccaaacttatgggacacatgaaagcatttctaagagggaaactcatagctctgagtgcctccaaaaagaaactagagagagcacacactagcagcttgacaacacacctaaaagctctagatcaaaaggaagcaaattcacccaagaggagtagacggcaggaaataatcaaactcaggggcgaaatcaaccaagtggaaacaagaagaactattcaaagagtcaaccaaatgaggagctggttctttgagaaaatcaagaagatagataaacccttagccagactcactagagggcacagggacagcatcctaactaacaaaatcagaaatgaaaatggagacataacaacagatcctggagaaatccaaaacaccatcagatccttctacaaaaggctatactcagcaaaactggaaaacctggatgaaatggacaaatttctagacagataccaggtaccaaagttaaatgaggatcaagttaatgatctaaactgccccatatcccctaaagaaatagaagcagtcattaatagtctcccagccaaaaaaagcccaggaccagatggatttagtgcagagttctatcagaccttcaaagaagatctaattccagttctgcacaaactattccagaaaatagaagcagaaggtactctacccaattcattctatgaagccacaattactctgatacctaaaccacaaaaagacccaacaaagataaagaacttcagaccaatttcccttatgaatatcgatgcaaaaatactcaataaaattcttgctaactgaatccaagaacacattaaaacaattatccatcctgaccaagtaggttttattccagggatgcagggatggtttaatatacagaaatccatcaacgtaatccattatataagcaaactaaaagacaaaaaccacatgatcatctcgttagatgaggacaaagcatttgacaaattccaacacccattcaagataaaagtcttggaaagatcaggaattcaaggcccatacctaaatatgataaaagcaatctacagcaaaccagtagccaacatcaaagtaaatggtgagaagctggaagcaatcccactaaaatcagggactagacaaggctgtccactttctccctacctattcaacgttgtacttgaagtcctagccagagcaatttgacaacaaaaggagatcaaggggatacaaattggaaaggaagaagtcaaaatatcactttttgcagatgatatgatagtatatatacatgaccctaataattccaccagagaactcctaagcctgataaacagcttcaatgaagtagctggatataaaattaactcaaacaagtcaatggcctttctgtacacaaaggataaacaggctgagaaagaaattagggaaacaacacccttctcaatagtcacaaataatataacataccttggagtgactctaactaaggaagtgaaagatctgtatgatgaaaagaacttcaagtctctgaagaaagaaattaaagaagatctcagaagatggaaagatctcccatactcatggattggcaggatcaatatagtaaaaatggctatcttgctaaaagcaatctacagattcaatgcaatctccatcaaaattccaactcaattcttcaacgaattagaaagagcaatctgcaaattcatctggaataacaaaaaacctaggatagcaaatactcttctcaaggataaaagaacctctggtggaatcaccatgcttgacctaaagctgtactacagagcaattgtgattaaaaactgcatggtactggtatagcgacgtcaagtagaccagtggaatagcattgaagacccagaaatgaacccacacacctatggtcacttgatctttgacaaggaagctaaaaccatccagtggaaaaaagacagcattttcaacaaatggtgctggtacaactggtggttaacatgtagaaaaatgagaattgatcctttcccatctctttgtactaaggtcaaatctaagtggattaaggaactccacataaaaccagagacagtaaaacttatagaggagaaagtggggaaaagcctcgaagatatgggtacaggggaaaaattcctgactagaacagcaatggcttgtgctgtaagatcgagaattgacaaatgggacctcataaaattgcaaagcttctgtaaggcaaaggacatcgtcaataagacaaaaaggccaccaacagactgggaaaggatctttacctatcctaaatcagataggggactaatatctaatatatataaacaactgaagaaggtggacttcagaaaatcagataaccccattaaaaaatgggtctcagagctaaacaaagaattctcacctgaggaataccaaatggctgagaaccacctgaaaaaatgttcagcatccttaatcatcagggaaatgcaaagaaaaacagccctgagattccatctcacatcagtcagaatggctaagatcaaaaattcagatgacagcagatgctggcaaggatgtggagaaagaggaacactcctccattgctggtgggattgcaagcttgtacaaccactctggaaatcagtctggcagttcctcagaaaattggacatagtattaccgaaggatcccgcaatacctctcctgggcatatatccagaagatgtcccaactggtaagaaagacacatgctccactatgttcatagcatccttatttataatagccagaagctggaaagagcccagatgcccctcaacagaggaatggatacaaaaaatgtggtacatttacacaatagagtactactcagctattaaaaagaatgaatttatgaaattcctaggcaaatggatggacccggagggcatcatcctgagtgaggtaacccaatcacaaaagaactcacatgatatgtactcactgataagtggatattagcccagaaagttagaatacccaagatacaagatacaaagcacatgaaactcaagaagaatgaagaccaaagtgtggacactttgccccttcttagaattgggaacaaaacacccatggaaggagttacagagacaaagtttggagctgagacaaaaggatggcctatctagagactgccatacccggggatccatcccataatcagcccccaaacgctgacaccattgcatacactagcaagattttgctgaaaggacccagatatagctgtctcttgtgagaatatgccggggcctagcaaacacagaagtggatgctcacagtcagctattggatgggtcacagggcccccaatggaggagctagagaaagtacccaaggagctaaagggatctgcaaccctataggtgcaacaacaatatgaactaaccagtaccccctggagcttgtgtctctagctgcatatgtatcagaagatggcctagccggccatcagtggaaagagaggaccattcgtgcaaactttatatgcctcagtacagggaatgccagggccaagaagtgggagtgggtgggtaggaaagtgcggggggaggttatgggggacttttgggatagcattggaagtgtaaatgaggaaaataaaaaaagagaagatctctcccctctctttgccaccaggaatcaagggctgtgccccctgttgtggcccagtcatcaatcacctgtatgagaacctcttccttcctctgagttctattagagggggcagccactctgcatcatgggccagaaccttctgggctgtttttttgttttgttttgttttgttttgttttgttttttgttgttgttgttgtttttgttttgttttgttttgttttgttttttttgtcagctggatttatgccacagttgtcttggaagaaggaaactcaattgagaaaatgcctgtgtctgatacaaagcattttctttactgattattgatctgggagggcccaggctattgtaggcagtgccactcctgggcaggtagtcctgggctgtataagaaagcaggctaagcaagccatggggagcaagccagtaagtagtgttccttcaaggcttctgctttgattcctgtctgcaggatcctgcctcagttttcctagatggtaggctctaccctgtgagccaaataaactgtctcctcctcaagttgcttttggtttatcacagcaatagagaagcaaaccaaaacactccttttagatcccttgccatattatccgtttctttgtaagtccatgatgttaataattttctcaatgaatctcttattcaaaatgacagtctaccttggtgtcccctgagcctcaaacctgaggcatttcagttactattcttgtccctgtgacatgtgctgacggacaagggacttactttgttcaccacttcaggggactcagttcatcatggtgtggagacacagaaagaggagtgacacagtacacactggtggcttccagaccaggaagcagagaacagacccaggagaggggctagccatatctttcaagcgtctgctggcgagttctatatcaacataacacaagcacacgtcacccgggaggagtgagccttgattgagaacatgcctccataaagatcaggctgtcagccagcctggaaggcattttcttaagtagtgattgatgtggtgggagggtcccgcgggtcccgccccgcccattgtgcccttccgccccgcccattgtgggtgggactacgcctgggccagtggtccaggcttttataagaaagcaggctgagcatgtcacaaggagcaatccaataagtgagtacctctctatggcctcagcatcagctcctgccccaggttcctgccctgtttgagttcctgtcttgacttcggttgatagtaaacagtgtcgcagaagcataagccacacgaaccctttcattcctagcctgctttggccatggtgtttcatcagagcaataataaacctaactaggacaaagggcatgcccctgttcccagtaacctcactccctccagcctggacctataacaccctcaggtggggcccacgtgagtctgagggggaacaaacacttcagactcagtttgtaagaggtaccacattgttttatgggaggaaagaagagctaggaatctcctattctaccatcttgcttgtaattgtcccctactcttaagtgataaattcttcagcagaaatataggtgggatttgtgttaaccttgagatctctatattctcacactcacacacatgcaggatcattggagacagaaaggacagtgtggaaatcagattgacttttttttttccacactgagagaaataattcctgaggttgtgacatttacctttggatagctctgagcgaggtcctcattaagacaggactgtaagcggctaatgcttttccgtgcattaggggcctttagataccatcagggctcttaagaacaggacagctttatagctcttgaaaggcaatatctctcctctttgaaagcatttcaggttcaaagaggggaaatttcccctctaggcagggaagggtacctcacactctccacagaatatcaaaaataactgaaacaacctttaataggcagtgagttggattgttagaagctgtgacagaaaaggctttctcagtaatagctgatttaaaagctaaaagcggtgtccctcaccaggaagagaaattaccaaatgataagtaacaggcttatttgaagtgggaggaccatcgagggatgcatgtggatttatacacacatgttacatcatgcgctcttcatgtcgaaattaccatagagtactaagaggaaatagaaggacaacaaggacatcgattaatcttcgtggggatatggacattttccctgaggactaagtctttagaacttccaggtcgacatcacttgggtctctgagtttgtgcccaag

SEQ ID NO: 1063 - DNA, 6208 bp, Mus musculus
ccggcacaatggggatctccactgttatctttgaaatatgtcttttgtggggtcaaattctgtctacagcatctcaaacagctgttcccacagatggaacagattctggtttggccgtgaggctggtgaatggaggagacaggtgtcagggtcgagtggagatcctttaccagggttcctggggcactgtgtgtgacgacagctgggacctcaatgatgccaacgtggtgtgcaggcagctgggctgtggcttggccgtgtctgccccgggaaatgccaggtttggacagggctcagggcccattgtcatggatgacgtggcctgtggaggctatgaggactatctgtggagatgttcccaccgaggctggctctctcataactgtggacaccaggaagatgctggagtcatctgttcagattctcaaacaagcagtcccacacctggctggtggaatccaggagggacaaataacgatgtgttctatccaactgaacaaaccacagcagagcagacaaccattcctgattatacaccaataggaacagattctggtttggccgtgaggctggtgaacggaggagacaggtgtcagggtcgagtggagatcctttaccagggttcctggggcactgtgtgtgatgacagctgggacgtcagtgatgccaacgtggtgtgcagacagctgggctgtggctgggccgtgtctgccccaggaaatgcctactttggacagggccaagggcccattgtcctggatgacgtggcctgtggaggctatgagaactatctgtggagctgctctcaccaaggctggctctctcataactgtggacaccaggaagatgctggagtcatctgttcagcttctcaatcaagcagtcccacacctggttggtggaatccaggagggacaaataatgatgtgttctacccaactgaacaaaccactgcaggaacagattctggtttggctgtgaggctggtgaacggaggagacaggtgtcagggtcgagtggagatcctttaccagggttcctggggcactgtatgtgacgacagctgggacaccaatgatgccaacgtggtgtgcaggcagctgggctgtggctgggccgtgtctgccccaggaaatgcctactttggaccgggctctggatctattgttctggatgacgtggcctgtacaggacacgaggactatctgtggagatgttcccaccgaggctggctctctcataactgtggacaccatgaggatgctggagtcatctgttcagcttctcaatcaagcagtcccacacctgatgtgttctacccaactgaccaaaccacagcagagcagacaaccgttcctgattatacaccaataggaacagattctggtttggccgtgaggctggtgaacggaggagacaggtgtcagggtcgagtggagatcctttaccagggttcctggggcactgtgtgtgacgacagctgggacctcaatgatgccaacgtggtgtgcaggcagctgggctgtggcttggccgtgtctgccccaggaagtgccaggtttggacagggcacagggcccattgtcatggatgacgtggcctgtggaggctatgaggactatctgtggagatgttcccaccgaggctggctctctcataactgtggacaccatgaggatgctggagtcatctgttcagcttctcaatcaagcagtcccacacctgatgtgttctacccaactgaccaaaccacagcaggaacagaaaacagtttggccgtgaggctggagaatggaggagacaggtgtcagggtcgtgtggagatcctttaccagggttcctggggcactgtgtgtgacgacagctgggacctcaatgatgccaatgtggtgtgcaggcagctgggctgtggcttggccgtgtctgccccaggaagtgccaggtttggacagggcacagggcccattgtcatggatgacgtggcctgtggaggctatgaggactatctttggagatgttcccaccgaggctggctctctcataactgtggacaccatgaggatgctggagtcatctgttcagcttctcaatcaagcagtcccacacctgatgtgttctacccaactgaccaaaccacagtagagcagacaaccgttcctgattatacaccaataggaacagaaaacagtttggccgtgaggctggagaatggaggagacaggtgtcagggtcgagtggagatcctttaccagggatcctggggcactgtgtgtgacgacagctgggacaccaaggatgccaacgtggtgtgcagacagctgggctgtggctgggccgtgtctgccccaggaaatgcctactttggaccgggctctgggtctattgttctggatgacgtggcctgtacaggacacgaggactatctgtggagctgctctcaccgaggctggctctctcataactgtggacaccatgaggatgctggagtcatctgttcagatgcccaaatccagagcacaaccaggccagatctgtggcctactactactaccccagaaactacaacagaattgttgactacaactccttattttgattggtggacaactacttctgactacagctgtggaggtctcctgacccaaccctctgggcaattttccagcccatactacccttcaaactatccaaacaatgccagatgttcgtggaaaattgtgctccccaacatgaaccgcgtgacagtggtcttcacagatgtgcagcttgaaggaggctgcaactatgactatatcctggtttatgatggccctgaatacaattcttctctcattgctcgggtttgtgatggttccaatggctctttcacctcaaccggaaacttcatgtccgtagtcttcatcacagatggcagtgtgacaaggagagggttccaggctcactactactctacagtcagcacaaactacagctgtggaggtctcctgacccaaccctctggacaattttccagcccatactacccttcaaactatcctaacaatgccagatgttcctgggaaatattggtccccaacatgaaccgtgtgacagtggtcttcacagatgtgcagcttgaaggaggctgcaactatgactatatcctggtttatgatggccctcagtacaattcgtctctcattgctcgggtgtgtgatgggtccaatggatctttcacctcaaccggaaacttcatgtccgtagtcttcatcacagatggcagtgtgacaaggagagggttccaggctcactactactctacagtcagcacaactcctccagtgccaatcccaaccacagatgactacagctgtggaggtctcctgaccctaccctctggacaattttctagcccacactatccttcaaactatcctaacaatgccagatgttcctgggaaatattggtccccaacatgaaccgtgtgacagtggccttcacagatgtgcagcttgaaggaggctgcaactatgactatatcctggtttatgatggccctgaatacaattcttctctcattgctcgggtttgtgatggttccaatggctctttcacctcaaccggaaacttcatgtccgtagtcttcatcacagatggcagtgtgacaaggagagggttccaggctcactactactctacagtcagcacaaactacagctgtggaggtctcctgacccaaccctctggacaattttccagcccacactacccttcaaactatcctaacaatgtcagatgttcctgggaaatattggtccccagcatgaaccgtgtgacagtggccttcacagatgtgcagcttgaaggaggctgcagctttgactatatcctggtttacgatggccctgaatataattcttctctcattgctccggtgtgtgatgggttcaatggatctttcacctcaaccggaaacttcatgtccgtagtcttcatcacggatggcagtgtgacaaggagagggtttcaggcttactactactccacagtcagcacaattacctaatgactaccactttatctcaggaaatgattcttcattggcgctgaggctggtaaatggatcaaaccggtgtgagggccgagtggagatcttgtacagaggctcttggggcaccgtgtgtgatgacagctggggcatcagtgacgccaatgtggtctgcagacagctcggttgtggctctgctctgtctgcaccaggaaatgcttggttcggtcagggctcagggctcattgtcctggatgatgtgtcttgctcggggtatgagtctcacctgtggaactgtcatcatcctggctggcttgtccataactgtcgccattctgaggatgcaggagtcatctgtgcactccctgaggtgacttctcccagtccaggttggtggactacaagtccttcctatgtaaactatacttgtggaggtttcctgacccaaccctctgggcaattttctagcccattctaccctgggaattatcctaataatgccagatgtctgtggaacatcgaggtcccaaacaactaccgtgtgactgtggtcttcagagatttgcagctggaaaggggctgcagctatgattatatagagatttttgatggcccccaccacagttcacctctcatcgcccgggtttgtgatgggtccctgggctctttcacctcaacatccaacttcatgtcaattcgcttcatcactgatcacagtattactgcgagagggttccaggctcactactactccgactttgacaataacaccaccaatctcctttgtcagtcaaatcacatgcaagccagcgtgagcaggagctaccttcagtccatgggctattctgccagggatcttgtcattcctggttggaactccagctaccactgtcagccccagataacacagagggaggtcatattcacaattccctacacaggctgtggcacaatcaaacaggctgacaacgagaccatcaactactccaacttcctcagagcggttgtttcaaacggcatcatcaaaaggagaaaggacctgaatatccacgtcagctgcaagatgctgcagaacacctgggtcaacaccatgtacatcaccaacaacacagtggagatccaggaagttcagtatggcaatttcgacgtaaacatttccttctacacatcctcctccttcttgtttccagtgaccagcagcccatactacgtggatctggaccagaatttgtaccttcaggccgaaatcctccattctgacgcctccttggctctgtttgtggacacctgtgtggcttcgccacatcccaatgacttctcatctttgacatatgatctcatccggagtggatgcgtacgggatgatacctaccaatcctactcctcgccctcaccacgcgtctcccgctttaaattcagttctttccacttcctgaaccgcttcccctcagtgtacctgcagtgtaaactggtagtatgtcgagcgtatgatacctcctcacggtgctacagaggctgcgtagtgagatctaagagggatgtaggctcctaccaagaaaaggtggatgttgtcctgggacccatccagttgcaatcccccagcaaagaaaagaggagcctcgacttggcagtggaggatgtgaagaagccagcaagctcccaggccgtctaccctactgcagccatctttggcggagtcttcctggccatggtcctggctgtggcagccttcacattgggaaggaggacacacattgaccgtggccaacctccaagtactaagttgtgaagtgaaacaacccagacattggctccacaagcacagattcccagaaaagatggaagacatgagagcctgacgcttggcacccagatacatggtgactaggattcccttagcacaaatgcttagccaagaacaatgagatggcaaagaagaaaggtgggggccaagttttcccaggatctacagactgaaggctaggaagaatgtcataggagaatgagaccagtgtctacaatcacaggcaactgtgagctgagcactggtggcagccatgctttctctcgctagactttcccttttccccatgtatagccaactttctccatctgtagtgtcgatgtcagctttttcttacaatactgcaatactgaatataaataatctttctcatggc

SEQ ID NO: 1064 - protein, 1345 aa, Mus musculus
GTMGISTVIFEICLLWGQILSTASQTAVPTDGTDSGLAVRLVNGGDRCQGRVEILYQGSWGTVCDDSWDLNDANVVCRQLGCGLAVSAPGNARFGQGSGPIVMDDVACGGYEDYLWRCSHRGWLSHNCGHQEDAGVICSDSQTSSPTPGWWNPGGTNNDVFYPTEQTTAEQTTIPDYTPIGTDSGLAVRLVNGGDRCQGRVEILYQGSWGTVCDDSWDVSDANVVCRQLGCGWAVSAPGNAYFGQGQGPIVLDDVACGGYENYLWSCSHQGWLSHNCGHQEDAGVICSASQSSSPTPGWWNPGGTNNDVFYPTEQTTAGTDSGLAVRLVNGGDRCQGRVEILYQGSWGTVCDDSWDTNDANVVCRQLGCGWAVSAPGNAYFGPGSGSIVLDDVACTGHEDYLWRCSHRGWLSHNCGHHEDAGVICSASQSSSPTPDVFYPTDQTTAEQTTVPDYTPIGTDSGLAVRLVNGGDRCQGRVEILYQGSWGTVCDDSWDLNDANVVCRQLGCGLAVSAPGSARFGQGTGPIVMDDVACGGYEDYLWRCSHRGWLSHNCGHHEDAGVICSASQSSSPTPDVFYPTDQTTAGTENSLAVRLENGGDRCQGRVEILYQGSWGTVCDDSWDLNDANVVCRQLGCGLAVSAPGSARFGQGTGPIVMDDVACGGYEDYLWRCSHRGWLSHNCGHHEDAGVICSASQSSSPTPDVFYPTDQTTVEQTTVPDYTPIGTENSLAVRLENGGDRCQGRVEILYQGSWGTVCDDSWDTKDANVVCRQLGCGWAVSAPGNAYFGPGSGSIVLDDVACTGHEDYLWSCSHRGWLSHNCGHHEDAGVICSDAQIQSTWDLWPTTTTPETTTELLTTTPYFDWWTTTSDYSCGGLLTQPSGQFSSPYYPSNYPNNARCSWKIVLPNMNRVTVVFTDVQLEGGCNYDYILVYDGPEYNSSLIARVCDGSNGSFTSTGNFMSVVFITDGSVTRRGFQAHYYSTVSTNYSCGGLLTQPSGQFSSPYYPSNYPNNARCSWEILVPNMNRVTVVFTDVQLEGGCNYDYILVYDGPQYNSSLIARVCDGSNGSFTSTGNFMSVVFITDGSVTRRGFQAHYYSTVSTTPPVPIPTTDDYSCGGLLTLPSGQFSSPHYPSNYPNNARCSWEILVPNMNRVTVAFTDVQLEGGCNYDYILVYDGPEYNSSLIARVCDGSNGSFTSTGNFMSVVFITDGSVTRRGFQAHYYSTVSTNYSCGGLLTQPSGQFSSPHYPSNYPNNVRCSWEILVPSMNRVTVAFTDVQLEGGCSFDYILVYDGPEYNSSLIAPVCDGFNGSFTSTGNFMSVVFITDGSVTRRGFQAYYYSTVSTIT

SEQ ID NO: 1065 - DNA, 260803 bp, Homo sapiens
  misc_feature (1)...(260803): n = A,T,C or G
atacaaacatgtgcccctgtacatgtacacacacacacccatgcccacgcacacatatgtgcacacccatgcacccatacctatgcgcatacgcacctgcccacactcaagcacttgcacacacagcacacatgcacacacacacacaggcactggctcctgggcctggtgctatgacgaggaagaaggaaatataaatggaatatttcccactcaaggaactagctgagtgccagtgatagcttcatggaggccatccatcgcggtttccctcctcactggtcaggcatagggaccccattgtggccatgcccccctttagctttggtgacaccagtgactcttttgtcctttggtttggctgagtgttgtgtgcttgtcattgccctatacgtgtttaaaactcttcctttgttccaatttccttagagtatttgttgtggtttttaatactacctgccaagctctcaaccacggctgacttggtagttgttgacaagtgagcagtggatttgggcctctgccttaaactctatgtgaaccagctcactgggacagagggcatggccagggcttcagggcccccagggccttacctgccactgagctcactttgggactacagtaggctcttcagccaacatgggcaacagatccttgcccccctccttttttaagactttccttccgggtgatgggtgtcctctgagccactcaacttggcccactttgcttgcagtcccgagccatgaccaccatcctcagtgtaggaataataggctggcagagacaacgtctccatgactggagcgtgggtggcttgggctgataccctgcccagaggccctaccagggccctactgggctcctgctcagaaccgggctcctgtgtatcttccctccaatcctggggcacggtgagttgtgaaggcacagtaccgtttgtcaccagcgtcccctgcctcctgttgctcatgctgccttccttttctgcccccgtgtggtttcactgacttgaaaggcccatgcttctggctgaaggtgagaaagagaggtggatagagcatgccgggccccgaggagaaggcaggctgcctgggctgtaggtcagagggcaggaggactgtaagcagggcccagatgtgcacagaggatgactttagaggaggtgaccacataatatcccaacccaacccacttgcttggttaaggggaagggggctgaagcaatcactgccctgggataagaagcaagaggggcgcctgtagtcccagctgctcaggaggctgaggcaggagaatgacatgaacccgggaggcggagcttgcagtgaaccaagatcgtgccactgcactccagcctgggtgacacagcgagactccatctcaaaaaaaaaaaaaaaaaaaaaaaaaaaagaagcaggacgggggccaggcgtggtggttcacacctgtaaccccagcactttgggaggccgatcacctgaggttgggagttcaaggccagcctgaccaacatggagaaacctcgtctctactaaaaatacaaaattagccaggagtggtggtgcatacctgtaatcccaactacttgggaggctgaggcaggagaactgctcgaacctgggaggtggaagttgcggcgagccaagatcacgccattgcactccagcctgggtaacaagagcaaaattccgtctcaaaaaaaaaaaaaaaaaaaaagtaaaaaggaagaaagaaaaaaagaaaaaagaaaaaaaaagcagccggactgggacctgtggccctagctagaggctgtgccatggagctcggtcttcatgtggaacacactggggttgccactgaagggtttatttcacaggacaatatgggatttgccttgtgatttttagggatctctccagcttctgtgcccaggggccttgtggtctttattccactttggctccttagccccatggccacaccctgaccatagcagcttccaggactgtggtctgatgtgccagtctccactcagcccagggccccagcgctcccttccctgatggcagccacatggctggtgatagagccgcatcccatttccctggtacctcatacaaccattccccagccccgatatcacacccatgaccctctgtttgcccgccttccagaccctcacccctggaaccacctggggctgttttcttcaccctaacccatggggccgagtgcagctgccaaagaccccacagtcgagtgggtgtggactcctcttatgtgtggcccaaccccagctgctgctgggctcttgttagtccttctgtgtaccttaggtcagggccctgtcctactctctccagggctaaatgccctcagtgtgcaggttaagctttcatttaggtggagatgaccagtgagtagttggaggatggacaggaagcaggcactgggtggagagggccagggtcagtgggagtagctggagcccatcaggggtgggagggagaagagggctgcagcagagcctggaatgcactcactgtccccagagcccacccctcccgctgggttacctgtctcatatggtggcatccacacttggcaatgaatccaatcagacctgggagtcatttgggctccttggtcccctttgtccccactcccctgatatccattcagcccccagctcatgtttctcactgtagttcccatcatctctgaaatatcttccttccccatggccgctgggtctgcttcatccctggagcgcagggtccatgacttattcacctgcgtgtgccttgatggggagctggcctggcaaacagaccagtgttccttacaagtttgcttcatgcaaatgttatctgtgttgtgcaagcctcagaatcccctggagggcgtgttaaaacacagattgctgggtcccacactgcagcctcagattttgcagttctagcaagttgtcaggcaatgctgatgctagtggtctagggcctgtgctttgagaaccagtgctctcgtgcatggactgattggctgcaactatgctggtactcaacgtatggtctggtccattcagatggaagtggctcaggggtccatgcaacaattagaatgcccttagatccatctgcttttttttcttttcttttcttttgaggtggagtctctgtgacccaggctagagtgcaatggtgtgatctcagttcgctgcaacctccacctcctgggttcaagcgattctcctgcctcagcctcctgggtagctgggattacaggccaccaccatgccagactaatttttgtatttttggtagagacgaggtttcaccatgttgacaagactggtctcgaactactgacctcaggtgatccacccgcctcggcctctcaaagtgctgggattacaggcctgagccaccgaacccggcctgatccatctgctttttgtggcatccttattctactggacttccaggcaattccagccaattgtaacttgttttcacacaactcagtaaaacccaccccactgtccccactgtccccattgttcaggaactgtgcagttgtttgcgaggcttaaggacaggtctgatttggggtacacttgaaagagtcccatatctcttatgtaccagatatggactctttttaagagtcccatatctgttatgtaccagggcttcatgtgtgggatttgggagggcagtcatgctgataagcatttagaggtgcccagaacagttctttatgcaggaaggatgatgacaggttccattatcttgataagagtttcttttggatgccatccaatttccttgtcctcattctttgctccccaagcaaactattggtatataattttgtccctcaagcagactaattctggagccaaagtatacaccctattggaaataaatgaattggcctcctggtttaccaattagtgtttggtgagtacaattagtgtacctgggtttcctggaacctgatcactctgggctgagcaatctccgaaaggctggcttagtgatgctatcctgcctgaaatgctaccccgggctggtgctttggtgactttgttcttggacctgaaaccagggtttctttgctcagttccaataaccctttggagaggcagcacactgtgcttcaccaagctcaagtgccttaatgggaaagagttgcaaaataacttcgggaggatggtgattgttggtgaagtagaatggctcttggaatctggggtggaggaatgagggtagcacagaggatccgggagtgggagtcacagcttcaatctccttttattttccctctttgctgtaagcctcccctgaactgctagttgccttcgtgattataaccaggtcagtgtagatctagtgttgccattaaaaatattctctcttcactctttcggggataggccacttaccaccttttgtagggcttatgtcaaaaaatctgcactctccctgatgacctcagagccagttttccttctctacccattcctttgaatggttctgaatagcaagatgtcctttggtgtagaggactcaaacctaccatttgaatggaaacatagtcttttcgtgggaaggggaaagattcagtgtcttttggaaaaataccaggctttggggtcagacctcgatttaagctctggctctgccagtttctgggtgtgtgactttgagcaagttacttaacctctctgagcctcagatttctcataccaggggcagttagtaggtaaatgtgatgccctatccaaagtcgtcctccctaccacagctattctctatgccattgccttgttcatttcctccataattcttaccacaatctgaaacccttctccctgctgattgatttcttgtctgttgtctgttttgcctccctgtgaggacagggagcatgtccatctggcattaggctgcagccccaccctctagagcactccctagagcagtgtctggcacattggaggcatcagcgtgtatttgctgaatgagcagatgaatgaacagcattatccttcggcaaacacagaactcacttgaaccatctgtgcaaaggggcctggtcctcctcttccagatctgcccatgctcatccagtcaatcaatctgcagacctatctatctatctatctatctatctatctatctatctatctatctgcatatatatatatatctatatatacaatttttttcgagatggagtcttgctctgttgtctaggctggagtgcagtgccatgatctcagctcactgcaacccttgcctcctgggttcaagtgattcttctgcctcagcctcctgagtagctgggactacaggcatgtgccacattcccagctaattttttagtatttttagtagagacagggttcgccatgttggccaggctggtcacaaactcaagtgatccacccaccttggcctcccaaagtgctgggattacaggcatgagccaccgtgcctggcctgaatgcagatatttcttgagcgtctactactatgtgtgaagcattgttctaggttctgagtatacagcaatggataaaacagacaaaaatcccaccttgtatagcttgcattttagtcagagcagacaggcaaaagaataaagaagtgaaatagaaggtggccagatggtgaggagtgccgtggggagaggatgggagtgttagggagtgctggggaggggcagtcggtaaggctgcatggaggcggtgctatgtgagaaaatctctggaggaggggaaggagtgagtctccagacatttggggaaaaagtcttcaggcacagggagcagcaagtgcaaaggccctggggctggatgatggttacagggggcaagggggagagagaggcaggggtatcttgtgcagggccttataaaccatgggagggctttgagccttcctctgagcaagatgggaggcatgcaatgagatttctgtgtgtcaggggtccctagagggctgtgtttgttgctggaagattccacggttggatggcatcctgatgaacgtggagctcatctgtccttcagatggggggcagcagctgccgtgagtgctgtcctggacatggtctcagctctgtgtgtcatttcccctctctggacctcattgtccccagctggaggctgagtggtggaggagaactggctcgtcaccagcccccgctgaaccacaagacttctttctggggacccctggacagcatgggtgagccgctcacaatccccaccttcaaagccattgcctgccaagcacctgctctgctggggcactgggatcacagaggggcagcaggagacaacaggtctcagcttgatcctcaaagcccagcagggaggtgtggggcagtggggggtggggggagtgagtgaaggagggtaggaaggggtccccttataacccaattgggaagaccggctctctgagcaacaaaaatgagcgacattataaatatcagacatacaatgtcaaaagattgttacaacagtaacaatgaccggcaattatggtgtgctactcaatgagggtaaaattagagtttggggtcagactgacacctgaaggggagccctggtcacacagattacgggattcagggactggaaggcaaacagcagcagccggaaggtgctacagccccgacccttcccaccaggctccccgtccttctgtccccctcgtctgtcaggtcacagggctcctggctcagaaatcagagacccctcagaggtgggaggtgggaggggccctgggctgcctccctgatctccgtcttcctctggcttcccagggcactggtctgtgggtagaaagaatctttagaagaaggagaacaacgggctgttttgggaagtctgcctgggaccccagctcagcttcgtggcagggatgtgtgcctggcagccccaggggccctgctgggcctctcagtgccctgtcttatgaagggaggtcttggcttcccacaggtaatcctcagctctgacggcaggtggccctaggggaggggcctggaagaggactccctcaccacagtcaggagcattccactggcctgttttatgttttggggcttccccatgaattccaatttaggaaaggattctgtagctttaaaaaaaaaagccatacatggccgggcgtggtgactcatgcctgtaatctcagaactttgagaggccgaggcaggcagatcgcaaggtcaagagatcgacaccatcctggccgacatggtgaaaccctgtctctactaaaaatacaaaagttagctgggtgtggtgatgcacgcctgtagttccagctactcgggaggctgaggcaggagaatcgcttgaactcgggaggcggaggttgtagtgagccgagattgcaccactgcactccagcctgggcgacagaacaagactccgtcttaaaataaataagtaaataaataaataaatggccacatatgatccagggggctcttccccataacgaccagtcctctggtgctgggatttaggggcttggtcccacctcctggagtgtgctgtgggggtgccgctggcttaattgcctggggaaggtgctttgcaaatggggcccgggcgccgagtctctgagctttaatgggcttatcttgcttcctgttgttcttcatggcagttctggggtgaataaaatggaactttgtggttgtggtcttccaacccctgctgtttaagcagatgcttctaaccagtaggaaggggaagatgagggtcctctggcaggggctgctgctggagaaggttgtccccctgaacccttctcttcgtccaaggaaagacctccctaaatggtgtcttatgagccacaaaatggccttgggacaagatgaggcacctgacggtgaaggctgaggtcccacacggtgttggcaggtggccctcaagcccattgtcttctgcccgcatgcccaggaccgccacatccttcctgttccactgacgtcacccatttcccacctgggatgcctacctgggctggctttgaaatgacagctaggcttcaccacttccttcttcctggtgtctcctgaacaaaaagctcacaaacccttattgtctcaggatcttttctgctaactaccatgggcaaaagatgcagtcaaaacaacaaaaacggggaggttacgcagttcagaaaatcccacacattctcaagaagggtgtccccgccaagctgagagatacctgggacatcatgctttcctggaggggaaggctccctgcccccattcctgtacagccgggagagtcgctcctgttcgtcatcccatcttctcgctctcatttgctgggctgacctctgctggtatttcaagactgtttggtgccaccctctctgagagatggcctccctcatctgatttagatgcttttctttaccttctcatagcagcttgtactaatacttgctaccccctgttgaaattgtcaccaggcaggtctgtctctaagaccagacagtctgcttttgtcttggaaggacacttattaccccttcctgttcacaggtatttagtattcttaccatcatctttccctgctgtgctcccggcagacaattctaatctgtcatgacactctgatgatcccagacccagctgcattatcattctcagtccaacactccaggaaccaagggatcacaatccccttctaagaggaatccagcatgtgcctggtcttgggcattccctggtaggtgagtaaccctgttctctcgtcacccagtgcttatcagttgctgatctggcagtaggaggatgaaacacagtgagcctattctgtgttcctattctactcaaggggtgaagaggcacctggaaacaacaggaagagttgtaggattaaaaaggacatccaagattgaatgtaactttcatctggatgaagccaaaggcagacttccagccctaaattctgactggtggctgacacaggacatgggttcatggtacccttctagaatgcagcatagactactgatgaacagtgcatggcaaagaagccaagtgtcatttcatggcctcagcctctcagctgagaagcagggcacagctcacccaggctaggaaaacagaggcaagtcctggaaagctgtctgcttttaaccaagagttactggccatcaagtgtcttggttaaaaaataagtgtcaggcaaccttcttggtagatagagtgtgttgggggcgattatcagagtctggtaatgacttctgagggtcccaaagagtgaagtgatatttacatagcaaatccaaggagggggattgtgtgcaatataggtggaggtgggggcaggttttgtgggtttgccaagctccaagggtcatacaatgtgcatgtcaaggacaagaaatcaaagccatgtgaaatggttggaggtggttcagtttgaggtcatgtgtttctcagctcctgttgtggaattagtgtgagacccagaagactgtggccaaagctattatggacccatggtctctgtggactcatccctcatgccttctgctctctgatcacatccacactcatgtcatcctcgttcttccaaggtgaggttactagcactgcacaggggctgatgagagcatgtcctgccaggaaaaaccatcccaaagagatgctttcccccttggcactgtgtcctgtatttgctcagcagcccacatcctgttctgccccaaaccttggggcagacttcccacaggtgaatttgaactccccaagattaaaatcaagcctgtattcaggaaacacttgggagtcctcgaggttcaccgagagggaagttggaaatttttcacttatgtcagtgcgtttgcagttgggcaacagccagattgttcatatggcaatcaatcaaacacacctaagttttttccacatattagccatcgactgttagcaaaagccctcacttcctttatattgatttatagcagcagcagaaatataccaccctagaggacacacctccttttagctaggtacctataaatgtccaggattttctattcaattgagaagaacccagcaaaatggggatctccacagtcatccttgaaatgtgtcttttatggggacaagttctatctacaggtattacgtttaattattatattcattaatttctctcctgcagacccaatcatggcaaattatatctactactttccattacaagggaagttttatatcaaagagtgggtagcactttgctgataattgtaattgtttgcaggtattcaggaggaatggctcttttttgttttatttctggctgagaaatataaatggttgtagttagaaaaagccagtcattaagtcaatgttttcagtaagtcattcaactaaaggaatgattgatttgtcttagaaaaatccctgaagtttaggaaaggtggatgtgtattattaagaggcccttaaactttgcagcaattggttaaacacacagtttgtgtgctatgaaaacggacagaaaggattcccactgcaaatgccctttatgtggcttctttctacaggtgtgtctggcttgatggctaatatttgccgagcaaaatcaggtcaagtaattgagcgcagacaagatcattaagattccaagtttgtcttggaattccaagtttgtctgtcatgcacagctttaaacaaacacttgaagcccagtcactcaagcatagctgtatgttcttagagagtcagatgataaacgtgagagagccgtcggtagcgcactctgattgctgcatctcaatggcattttgcagagatactagaggaacaagtgattctcagtttgcctattctgtctctctcttcctctctctctgcctctctctctctctctctctctctatctttctctcttatctattgtgtagttattatcatcttttctctcccctctctctccctctgtttctgtctgtctgtgtttctctctctctctgtatctttctctttttcccatcttttgggcagatatcaccttttcttcctcctcctccctctgtttctgtctctgcctttctctccctgcccccctcactgtatcttcctgtctttctcatctatcaggcagttattacctttcctccctccctcctcccccttctctgtttctctctccatctctctttctctttattgggcagctattatcacctttctctctgtctctgtctctgtctctctttctcttcaactattgggcaactattatcacctctcctctctctctctatctgtttctcttcatctgtcaggcagctattatcaccttccctccccctctctttttctctctcactctttctcatcatctattgggcagctcttatcacttttcctccctatttctctctctctctctccctttgtttctatcttctttctaccttccttccatccctttttctttctctccctctctttattcatttctttcttccttcttctcttttatctttcctactgccttttttttcttttatgtcaccttttgctagatttatgaatttcaggatacagggtaaaaatcacctaattttcaggtaacttccggaactctcactctccccctaggctcagtgggggaagatttgaagattaaggttcatctggttggttgctttcatgaaagcagcacctcccaacccagccctcacacccgggtggtagggagcaggcccaccccctgtgatgagcgtgtggagggcctgggggccactaggcccaggacctcaggggagtggagactgggcatcctcatcctgcctccatcagaagcatctgaaactgggaggctgcgtcctcagccccagctcttgtcagtaccgagttcaccctccagattgtctctgaaccatgacatggaattcacatcagccactgtagacagggagtgaattgccttgtctttatctacaaagaaacaacaggcagcagtgctcttggattgaggacatttgtagtttgcccatgatgttttgtgcatgcatatggacagacatgcacatatgtgcatgcatgcctgtgtttgccattcagaggtgggaattcatgctctctgaagtggacccgtattctcttatttaaatcttctaacattcctgaagttaggaacaattatttccacatttcagatggggaaactgaggctcagaaaggttattggcttgtccaaagacagcactggtgagtggctgggttagggcttgaatctggatcaaattcactagcattcagatgacagctctggcccactggcccttgctgctccttgcagggaactgaggtgatgaactgaactgtggcatctaactcagtgcttggagcctgaccacagagctttgtgctggaagtaccgaggtggcaggcacctgtcagctctggtcttcatgcaaactcttgagaaaaactcagtatgcccaggtttgtgctgggcaggaaaggctgtggtacccactgctagccccagcaatgcccctcctctgccacttgcctgctgtggatcctctgtgaccctcagtttactcatttataaatggaggttatgttccaacccatgcaatatctggcacatagacagagcctcagaaccatttagtgttactactctagacattttcctcatgttttatccaaaagcagcttcctaaaagtaatgtgagctcttggattggatcctgcaacagaaaatgaaaaactggtgaaatccagataaagcctggagtaaacttagtaggaaggtaccagtgtttgttagcatgagaatcacttgaactcaggaggcagaggttgccgtgagccgagattgtgccactgcactccagcctgggtgacagagtgagactctgtctcaaaaaaaaaaaaaaaattaataaatcattttccagaagtgattcttctcccttcaggcaatttaccaccattcccacaatggcagctggagtaacctacagctatgtggttgattcttggaagactacagattggtctcagtatgtgcagaagggtctattcaaaatgtgtggacacagcagaaccaggaacaacttcaatgtggtgttccatgctgtggatgagccttgtcaaggctctggctggatgagttcgactgccatgggattaggcaggatacctgggacctggcagtgggaattgcatggtgtcaggtagactgtgtttaaatggccgagttttgaatggaaggctctcttaggcacatctatcagctcgttcttgagtgtgggagcagggatggcacgtcagaaaagaggtggggatgttctggtacagagttccctagtttgctatctctgttgaaagaatgttgtggtttctattccgagtttcttcttcattttaagggatgcatagccacatggtttcagtggcccccttcctaagccatcaatatgaagcagggcagctgggggagcccatcgtggagctcatattcaggctgttgaggcaggtgaagatgttctctgacatatggcaagtcctgtcactggcctgttggttccattagagaaattcaaatctctgaactgtgactgtcactgctctcaggacccacatttacaaagaatctgaagagccgggcgtggtggcacatgcctgtagttccagctactctagggctggaggcaggaggcttgcttgaacccaggaatttgaatctagcctgggcaatagagcaagactctatctctaaaagtaaaataataatctgataattttgtcaaatgccttaatcctccttttaccaggaagtaaaaagaaaaggaataatgaaagtatgctggaattgttaataagaatttaaacatagcagacctttttatatcacatacattttggtatataaacatcataaaagacaaaagaataccatcacaggtatttttttttttttagcaaaataagatggttgaagttcttgttgcaaaatatcatgtgatgaaatccctatcgaagtgtgtaagagtaccgtattttatttttgtccttagaattgtatcattgaccctggattcttgaatttgagaaattcatctaggatatcatcatctgaagactcatagtctgagatttctgttgtacaatcaattctaccattattagtatctggagtgctatatcttgtctctatattcctcttctggttcatctaattattgcaaaaacatcttctcttgtcagttttcttctctttgccatcacaagtagaaaatgaaaaaatttgaattcttaactgcattcaatgaaagctaaaaacagactatgaagaaagtgtctccagtcttaaaaaaaaatcttcttgaaagataatacaatactttgggcatggaagaattatgacttatttcactagttcatcttccttctaggcaacttcaccattctaccattttcttactatttaataattgatgaataatgatgcaatactttcttggatgatgaaatagtgaaatgcttcaagacataggaaaaataaaatcagaagccaataatgaatcttggatttataaaaggatctaatggatccatatggtgattacaagataggatgagttttatccttttttttaaatgaataaatactctctctgatctttgaaagacctctaaaatatataaaagttgtgaaatatcaacactcacgagtatagttagaactgctcaaaaagaaactcaaaagctacagttgagtccgatggaccttgtctggcctcactgaatataaagatccagggatctctagatttccatttgcttcaagatggaataaaatattttcaggttatgagtcagaaggaacagaatatctgacattaacatattttcttctttaggggtcatctgagtggctgttgcagctatactcaaatttcagactggacaaccagcttaagctgtcttctcttgtccagcccttctttccaagcatagattacatcctgtcaccataagctgtagtgttaggggcctagtaaagagacatatgcttcattacatctaaaatgattgagctcctcatatccaatccacttgctttaatccgctattgcagaattcatttagcaagaacgtcggggacacacaaacccaagattgagccacagcgccctctggtgtgattgtacggtgaagcgaaagccaatttctgtgacttgtaggaaatcatttctaaacagtgtttctaagacgaatttgtgttctttccaggtgggtggatcccaaggactacagactacggtaagaccttttcttcactcctcttccctggtggggttggccagttctcctctgctgctgttggctagttgaggctgagcacagctgaggtcacagagcaaacgcctgccttgtcgaacgcaggaatgccggggggacaggagacgtgggtgccaagacctggggcatgtctcaagtgcccactcggccaatcccagctgtcattctccttcctcttgctctctgactctcagtcatttatcagatgaggttagtttcagtttggtgtgaggagagatagttgaaaataaaggttagtaccttttcttttttttctttttcttttttctttttttttttgagacggagtcttgctcaccctgtcaccagactggagtgcagtggtgcaatctcagctcactgcaacctccgcctcctgggttcaagcaattctcctgtctcagcctccagagtagctgggactacaggtgcgcgccaccacgcccagctaatttttgtagttttagtagagatggggtttcaccatgttggccaggatggtcttgatctcttgacctcgtgatccacccacctcggcctcccaaagtgctggggttacaggcatgagccactgcgcccggcctaccttttcttttcactagtaatgacaggtatcttgaagataactaacatctaccaagcacttgttatatatcctgcataaaatgattttcatgtatgaaatgaattgatatatttaaaaaaaatacttaaaataccacctggcacctaataagtgctcaactaatgcacatagtgagtgctattatcatgaaatcttcccaagaacactttgaggtaagtaatacgattatacccattttgcagatgggaaaaccagggcacagttagctaatttgtcaatatttctatgtctaagatcatgtgtctggtgagtagcagggcagagatttgaggctaggatgggtgcctcctcttacccctgccctggtctttgactttggctgaatgtccctgcctctccagtgagaatgtgcagagaactttgtgcccaagtttaatttttcagggccttccatgtgttcacttaggatgactctgctcctgggcccttggccttgttgaggtcagtccctccccttccaggacatgacttgagagatccagaaatggcctgggaaaggcagatttctgaccaacacagagcaagggagaggctgaggcagggagaccaagcactctcctggagggaccattcacagggtgaccaggagggggcgcattgccccactgcacctctaggttcatctctgatccagaagagttgcagatggaatagaaggtagggtgttttgctcgtaagaggggcccttccgaataaggcctcaggtctgaacaggcatctccatggattatgtccctgagactggggaaggacagagcatgggaagtccagaatgtactttggggataccctgaagatggtccagctggcctttcctccctctgggaggaaaagcaacctgccccctccctttgcatcccattccagcctctcactctgtgaccacaagtttctcataatctcaaactcaccattgaaaagccacacccaggatctggctcctgctgtcaggacggtgggctgcacccctcaggacctgtgcctatttttctcacaccatcaatacagcttaccccagtgggtggtctagtggcatcacgttgggcaggaacatggtgcttattgacttcccagcatggccagctccacggtgggaagcaggctcaattagcccctcccaggacaggaggctggaaaagtaggtcgaggcttgctcttggacttgatcctgatgggactggagagtgtactgaagcattttgagcaaggaattgaattgaatatatttgtactttctaaagataaaacttgaaaaccacctggagaccaatgaatcctcttagtatagaaatgggtgcagagtaagcactccatcgatgctgattgaatcaatgaatgtggatggactagagaaaggaagagcagacattgaggattcagctgggaggaggccaggttcaaggggatgaaggcttatcccagtgaaatggcagtgggaacgacacggaaggaatgaccttggtgatgttagatgtaggatgtgaggagaaggaggagtcgaatatgatgcccttattcccagcatggttaatatggagcatgatgacatccttaattcaaatggagggaagaggctgtgttgagtttgggatgatgtggggggtaggatggccaggaggccactgaaaatgctggtctagagctcagggctgggctgtcagggctgagtcagaaccagagaggtggatttgggggtcttctggaaagttctcagagtacatgaggttctccagggggaaaatacagaatgagaagagggcaaagagagaacatggaagaacagggatacttaagatcctgctgggagaaagattgtaaataggcagggtggtgagaggaagaaggaggagtgaggagggtagggatgcaagtcaagggggccgagagcacctagataaaagcttctggctgtgtcactgcaggtctgcctctgaggctggtgaatggaggtgaccggtgtcagggccgggtggaggtcctgtaccaaggctaatggggcactatgtgtgatgacagctgggacgcccaggatgcagatgttgtctgcaggcagctcggctgtggctattccatgtcagccctgggcggggcccactttggtcagggcttgggaaacattcccttgggtgactggcattgcttgggaagggagtcctacctgtcaagctgtccccacagcggatggtacaaccacgaatgtggccacagggaagatgctggtgtcatgtgctcaggtagtgtggatatcaccttggtctgtgtatctgcaactctgagtcaatattaccacacataagtatgtgtgtgtacatatgtgtgtgctctacagcttacctgctttgcagtaagtcatgtcttaattgatattggagggcaggtggtactggcccttttcatagacaatgaagatcaagggatcatcggccagtccttctaaagctggacatagtggaggcaggcttcagtctcagccccccagagcctgctgatgcaatcacctcatggactggttttgatgagcagcatcacgaccacccccggcctgggataccaaatatatatcttcctaagtggcagtttctcctcctttaaaagctgacgaggatggaggaactgctggtccttaaaacataaatgtataccaacatcaaattgaggagtgaaccaaagcattctctttatttggaattaaatgacaaataaaagctacttaatatcctcaatggaaaagagaacttctcctggacccaacccagcaaatcccagtgttgatttcctttgttcgcgtagtgccaggaagtgtgtggacaccaaggggtcctttagttcccaaagaaaccttcaaggacactgtcccatggtgtgttccccaaagaggagtttgtggttagaatgttcacttctagagcaactctggcatttgccgtatggactggactgagcccatgccaccatgcatgggatgtacccttgataatccaaccagcaagtgggactggactccccaaggggacatggtcctccatgcaaccactttgtgagtgatttatttcggcattctgaaaaggttggtattctttcgaaaccacctttctttctagttgaaccatcttatcaggagtatttcagtgatggtgaatgtttgtcatttgagggtgtgttttagctatagatacagccagttgtcattgacattggatcttgtgactaggatggggctatgagtggacttggtgattttttgaatacagctcgtggcagcagaggaggtggggggagggtaacaggagcaaaggatgctggtgtggcatcctagcccagcctggggccatttcagtgatggagcgattggcacatagttggcttttagcaatggagggtgcccttaggccatgacttccagttcttgcttgagagctgaggaagccagggaccagccctccccaagcaagggctaccatcaatgagctcttccttttccaccctgcagcttcactgattccctcggaggtgcccttggatacaactgtagcagaaggtaaggtctattatgggggatccctgtgggctcattaccccactgcacccctaggttcatctctgatccagaagaaatgcagaagccatacttctagcaactctggcattcagtgtttgggctgactgaacccaggctaccatgcctggggtgtgcccttgataatccaactaccaagtgagactgggctccccaagggggcatggtcctccatgcagccactttgtgatggtttagttttgcattctggaatggttggttttctttcaaaaccatctttctttcttgttgaaccaccttctcgggaatatttcagtgatggtgaatatttgtcatttgagggtgtgtttgagctatagaaacagccagatgtcttttgacattcaatcttgtgactaggatggggctgtgaatagactgggtgactttttgaatagaggctgtggtagcagaagaggttgggggagggtaagtagagcaaaggatgcttgtgcggcatcttagcccagcctggggccagtacggtgacacagtgattggcacatggttggcttttagcaatggaggttgcccttaggatctgtgtttccagcccttgcttcagagctgacgaagccatggaccaaccctccccaaacaagggctaccatcaatgagctcttcctttctccaccctgcaggttctccatttccctcggagttgaccctggagtcaactgtagcagaaggtaacgtctactatgggggatccctgtgggctcattaccccactgcacccctaggttcatctctgattcagacgaggtgcagagggcatagaaggtagggtgctggtgtcatgttctcaggtagtgtggatatcaccttgctctgtgtatgtgcaactcagagtcaatatcaccacacatgagcacgtgtttgtacacgtgtatgtgctctgcattttacttgctttgctgtaagtgatggctgaattgacgtttggagggtaagtagtattgccccttttcatagacaatgaaggtcaagcggttatcttcctgtccttctgaagctggacgtggtggaggcaggcttcagtctcagcccctcagaatctgctgatggaatcaccttgtggactggttctgatgagcagcatcacgacaacccctgtcctggggtgccaaatatttatcttcctaagtggcagtttctccttttttaaaggctttggaggatgggggaactgctggttcttaagacataaaggtatcccaacatcaaattgaggagcgaaccaaggcattctctttactgggaattaaatgacaaataagatacttaacatcctcaatggaaaagagaacttctcctggacccaacccagcaaatcccagtgctgatttcctttgttcacatagtgccaggatgtgtgcagacaccaagagatttctttaattcatgaagaaacctgcaaggacactgtcccatggtgtgctccccaaagaggagtttctggtgaaactgtctacttctagagcaactctggcattcagtgtttgggctggactgaacccaggctaccatgcctggggtgtgcccttgataatccaatcaccaagtggaactgggctccccaagggggcatcgtcctccatgcagccacctttttgagtggtttagttttgcattctgaaatggttggttttctttggaaaccacctttcttgttgtaccaccttctcaggaatatttcagtgatggtgaatatttgtcatttgagggtgtgtttgagctatagaaacggccagatgtcatttgacgtccattcttgtgactaggatggggctgtgaatagactgtgtgacttgttgaatagaggctgtggcagcagaagaggttgggggagggtaaggagaacaaaggatgcttgtgcgtcaccttggcccagcgtgggaccagtacagtgacagagtgattggcacatggttggcttttagcaatggaggttgcccttaggacctgtgtttccagcccttgcttcagacctgaggaagccatggaccaaccctcttcaagcaagggctaccatcaatgagctcttcctttctccaccctgcaggttctccgatttccttggagtcaaccctggagtcaactgtagcagaaggtaacgtctactatgggggagctctatgggctcattacccctctgtactcctagattcatctctgatccagatgaggtgcagagggcatagaaagtagtgtgctggcgtcaggtgctcaggtagtgtggatatcaccttgtgctgtgtatgtgcaaccctgagtccatatcaccacacacgagcacgtttgtacacgtgtgtgtgctctgtagtttacttgctttgctgtaagtgacgtcttaattgatgttggagtgtgagtggtaccaccccttttcatagacaatgaaggccaagggatcatctacatatccttctgaagttggatgtggtggaggtaggcttcagtctcagcccctcagagcctgctgatgcaatcacttcagcagcatcacgacctggcctgggataccaaatatacatcttcctaagtggcagtttctccctttttaaaatttgaggagggtgggagaactcttgggacttaagacataaatgtatatcaacatcagattgaggagggaacccaggcattctatttactggaaattaagtgacaaataaaagatacttaacatgctcaatggaaaagagaacttcccctggacctaacccagcaagtcccagtgctgatttcctttgttcacatagtgccaggatgtgtgcagacaccaagaggtttttttaattcacaaagaaacctacaaggacactgtcccatggcgtgatccccaaagaggagtttctggttaaactgtctacttcaagagcaactctgtcatttggagtgtgggctggactgagcccatgccaccatgcctggggtgtgcccttggtaatccaaccaccaagtgggactgggctccccaagggggcatcgtcctccatgcagccactttgtgagtggtttagttttgcattctggaaaggttggttttctttcgaaaccaccttttttctggttgaaccaccttctcaggtatatttcagtgatggtggatatttgtcatttgagggtgtgtttgagccatagaaaccgccagatgtcttttgacattcaatcttgtgactagcatggggttgtgaatggactgggtgactttttgaatagaggctgtggcagcagaggagatgggggtagggtaataagagtaaaggatgctcatgtggcatcctagcccagtctggggccagtacaatgacaaagcgattggcacatggttggcttttagcaatggatggtgcccttaggacctgtgcttccagcccttgcttcagagctgagcaagccctggaccaaccctccccaagcgagggctacgatcaatgagctcttcctttctccaccctgcaggttctctgattccctcagagtcaaccctggagtcaactgtagcagaaggtaacgtctactatgggggatccctgtagactcattacccccctgcacccctaggttaatctctgattcagatgaggtgcagagggcatagaaagtagggtgcttagctcccacgaggggcccttccacaaaaggcctcaggtctgaacaggtatatcttgcatcgatcatgtctgagactgaggaggaatcaacttgaagacgcgtctccaaggagttctcagtggagccttttattctgtctctagagattctgttatctttgcttgttgctcactcctgtgttcctcacccagctgtgctcatccgtggccagcctagggttctggatctctggctacagggccttgagggtcaggtgcctacctgctaacgtaaccaaattgctaggacagcatccttgcccttgccctttctttaagcctatattatgccacccttgtttcttcttaacagagagaaatcacaatccttcagctcatgggcatcagagctcatgtacttcccccttgggtatctccagtgagaaatctgggagacatagtcaatacatcctgggattctggcagcctgggctttgggaagggaagtcacttcccatttcccgtgggaaatcttggccctaggagaagctcaaggacaacattctcaccaaggcctctgcgctgcccagggttggcatgcagttgggaatgctgatggtacatgcatcggcccctcctgttcctcaggtcatcttctttcttctcccttctccctctggcccatggggtgaggtctgacttaacctcttcctctttcctatgatgaaggacacagaagacacttgaagtgagggtgagactggctttattctgacttagccatgtcccttcgcaagattcccacattttcttatttgcagcagctataagaggagaatctgttccttcctcttgagtggtttcccctgaggtccctgttacatgttaaggaccacaccttggtgtgacaagccctttggtataactggtccagccagggatgggagtgagggggcagaggtatttggctgatctgcctgtcacataggactgcagataggacttacctggagttgctcttatcaggaactctagtgtcagctgggagtcacatttcttctagatctggagacctcacgtagcagcccagtggagagctcagacagaagctgagtgctgtggctgcagtgggttaagggtaactctcagatcacttcctctccaagccccagcactcagtcagctcctgtaggtgccctggataaattccagggctctggagcaattcaaaaacggagattccaagccagtatcttacttaaaggggaatattagaagcatttctgctaatgtgaaaaacaaggcaagtatgccctccatctccactgctgttcaatgttgtactggaggtagtagccaatgcaatgagagaagagaaatcaattagaggcctaagcatgggaaaagttatttttgcatccctcttctggagttctgtataggttacacgtaggcacatcggaatcagagtgagtatgttggtacagaaatatttcctccccaagcagccctttagaatcaaagaactcaatgctagacaggtttcttgactttcccaaatttacacagcaagacaatatccagatcaggagtgatggctcctcagcagatcctagtttactttcagcccatgagtgacttcagaggagacctaactttatattttctggttttttttgggggggtgtggtggggtttgtttttcatcttctacaattggcaaaagcagagactaccactacaaatactgagtctactgttgtgacaggtaatgagtaactttgaatccctttctgtaggtcatgttgccaactatatccatgggctttactgttactcaggaaaaattttagggaatgggatgggagggaatgttgtgagtacacagtgaccttctggatcccagaggtcagctagagtgaagcttccttcattgcccatgttcctggaggtagggagaaatcagtcagaatatggtgtctccaagagcctgtgtgctttggaagcagagaccagtgggatcagtctccagtccagagtgacagcccagctcccccatctccacagctctgtgctgaccctaacaatcctggccctgaggaaggctataaggccaggaatatcatgtgacaaatgtgctccaaaccaaccttagagctgcagatacacatcagagctcctcccgggacatcttgatgttattgtgctgctcttcagtgtgggatgttgtgtgtcccctgtctgagggaatcaggcagagcccatggtctgcttagagaagggtcatgtgtatctctaggtcccctccaggatgcagatcaggaggagccttttattctgctccagctgaagctctaaggcttgggtttgggccaagcagtcactgtcctcttccccatgaagaactctaaccttaaggcctgttaaagcccagcccaattagagattctctcaaagatatctgcctatggggaagaccctgaatgccctgcaggccctgagactttgtgcctcagtaggaatgtgcaagagaaattctgtgccttcctctaggatctgattctggtttggccctgaggctggtgaatggagatggcaggtgtcagggccgagtggagatcctataccgaggctcctggggcaccgtgtgtgatgacagctgggacaccaatgatgccaacgtggtctgtaggcagctgggttgtggctgggccatgtcagctccaggaaatgcctggtttggccagggctcaggacccattgccctggatgatgtgcgctgctcaggacacgaatcctacctgtggagctgcccccacaatggctggctctcccataactgtggccatggtgaagatgctggtgttatctgctcaggtaggcatccagatctctggagggttgggtgtggtggctcatgcctttaatccccacactttgggaggatgaggtaggcagattgcttgagctcaggcgttcaagaccagctctaggcaagatggcaaaccccatctctattaaaaaaagaaaatcacttgggcccattctggggacagactgtattcagagaatatagtaacaggtttctcactccagggcccccgcccaagtctttcctggttatctggtggctctggagtttagttggggcagttggcctgtgggtacaatgccacggtcagcacaaatccccaagctgcgagcagtgccgcaacattggtttggaggtgactgaggcaccagtgttcagacacagggtccagcatgctgacatcagaaatgatgagctttttattctgctccaggaacatccgcataactcatacccccattttccccgaggctccttctcagggacagcacgttttggggatctggttggtgaagccttccctccccttgaacactgtattaccttgagtgttgtcagccgctgacccagagggaaggatgcaattgtaaatagttcacttatgattgctgtgaagagaggcagggaagtggggtaagggtgggaggatggcagtgagtcgcaaatggtgggctcacgagtgagctcagcatagggagcagggggacctcctagagtatcaccaggaatccacgtcaaacctcagactcatcgcagctcaagcgtggagagttagggtcttcatctactcattgcttagggtggctgtttgctgctccctgggtgttgataccgaggttgttgtggccggtcccaggcaccgaagtgaccttcatatccctggagagtgagccacaggcacagagaaggcaatgccaggggctgtggggtccctgagggaccgagggcttcacggtgggcactggcagggcccacttggtgggcgtgtgatgggcatcagctcagggtgtagataccccaagtcacttcagccttaactctacttggagtcactgagtgtttggtgtctaatgttgctatttttttctcacagctgcccagcctcagtcaacactcaggccaggtgagtccccagaatccttcctcgggataccccttctctttctgctcagttaccccttccctactccacagagccctcctgcttctctgcagatactctggggcatattatttcacccccaactctgtaactgagaccctagcatggggcttcttaaccacacatgggattcagcttctgccttctcttcagtccatctcagctttcatcacacagttccatgctgtcccaatgaacaactcttagaagttcagaaagaagcctgctgtttaatgagctttggcctctttatattcagggctgacacaacctttctgagaattgagggtgagaccctctaatgttctgttgaaggcaaggtcagtacaggcttgatacccccatctctcactacttgaaaaacccccagattctgcagggccacgtctgcattcagaagaggcagaggccatgctgaggggagagagaggctaagaaatgtttctggtgccttcacttaccaggaaacctgatttcccccagggcggacccctagtatcccgaacattttagctgcaagtgtcaagtcttggcagtggtgtcagatgagccagtcagtccacgcgtcagtggatggtgggggatgggggtggtgaaggtttcctaactgcgaataggtcatccctctctcagagagaggtggaagggcctgcatggtgtcctttgtccctgaatgagttccctgggcaggagacctgggcagacacatggggagcaagtggccagaccttcgagtggaattgttttcacagtgcttgcctggtccagagaaccgcttgttttttacctttttcccttcaagtccaattgtatcctttctctttgttgctgtttacagaaagttggcctgtcaggatatcaccacctgtacccacagaaggtaaagaatcctctcaacactccctggggctcactttctacctctggatacactttggatttcatagttcacttatgattgccataaagagaggtggggaagtgggctaagcgtgggagggtggcagcaggtgataaacagttggctcaagagtcagctcggcactgggaacaagagcaggacctcccagaagatcattaggaatcattaggctcatgataggatgaggctcaaggtgggccccttgctttttcatgtttctgtgggttgggtagggaggaagctggagtctctgaaaacccagaattagatgtgatattggagggtggagggtgctggtgacctgtctcctgtgggatcctgttccaagtggtcagaaaagatccttatctatgggctcagaacaagccctgggggtctccctaatcctatggggacctcatccctgccatctctggtactctgccagtcagatcccagataggaccatgctcctgaataagggaggggtctgggcctgccatctggagctgagcagctccatcctctgtgtacccaactggggagtggggcatccattcccatcacatccactggggtcacaggtgcttccccaaaagttgagcatccatagacctgggcagagtaggttatcagtgctactttcacgttgatgaagcctagtctgtggtcatatgcaaaggtgactgcctgcctaggtgacttagttcattaggaagtaccctgagtgtggaacttaccttagattcttgacctcatgatagggatggatgaagggttcttgtgttcccctgtaggatctgaatccagtttggccctgaggctggtgaatggaggcgacaggtgtcgaggccgagtggaggtcctataccgaggctcctggggcaccgtgtgtgatgactactgggacaccaatgatgccaatgtggtctgcaggcagctgggctgtggctgggccatgtcagccccaggaaatgcccagtttggccagggctcaggacccattgtcctggatgatgtgcgctgctcaggacacgagtcctacctgtggagctgcccccacaatggctggctcacccacaactgtggccatagtgaagacgctggtgtcatctgctcaggtgggccttcaagaacttgggctcactctcttggggtggagtttgctccaaaagaaactcctaattacattctgatctcctcactcaaagcttctatgttttctatgtttctgaagacttgtcagctctctgctaagaatccatatgtactcactgcctagtgttcctgtggtcacttaggacaggggatcaaactaaaacaacccagagtttttccccttcctgaggcaaggcaaggaagaggcagaagagaaaagtgccggctccccagggctccatttctcccctgctgagtagcacggtgtgagggtataatggatgcagcacagacagcaaggcaggggagggatcccctcactgcgaggaactctgaactaaagatgcttggctaaaagtgggttctcagctgagacccagtgaggaggtctggaaatagaggctcaagggttaggagtgcaaatgggtgtctgtttgtatcaggcctgggttgcgtggggttggagttcttgacctcagctcttctcagaacgctgctgagcattgcctgtgttctaggtctggtgaggggagggcagtccccatgaggccagccagacatggccttgtcattgcctgtgattggggcttgaagatcgcacaagggattttggctggagtggcttcctcagccttgctgactcaggaacacctaagatgtgcaagggagtgggttggtttaggtcaaccgggttaccctgggcagacacaatttgatcacctcagagctggcaatagtggacaggatctgcctcgaccccttacacggtgcatctctgtggggatgtgcatggcaatgtccctccctgtgtgataggaactaggatggactgagtgtcagactcgctcatttctttccctcctcgttccagttttgccgacttctgtgtaatgttcctgatctgaccttctcttctctttctcacagctccccagtcccggccgacacccagcccaggtaggtccccagtgtccttcctcaaaatgtcccttctctttctgcccaatcaccccttccacactccacagagctctcctgtttctctgtgtggatactgtggggcatattatttccacccccaacaccggctgtgtaactgagaccccagcacagcgctttttaaacacacacaggattgaggaggcctctgtcttcttttcaacccctctcagctttcatgaaacagtttcatactgtcccagtggacaacccttacaggttcaggaagtggccccatgtttaatgagctttggtccttttatattccggactcacatatagtttctgaaaattgagggtgtcaccctctgacccgttcaaggcatcgtcagggcaggctcgatacccccatccatcactgctggaaacattccgagattatgattccgagatttctatccagaagaggcagagtttgtgctcgggcagggagagggataataaaggtttgtgatgtctctgcttaaccagaaacctgattcctgattgtcccctgggcagcccctggttcccctaacattttacctggcagtgtccgagcctcagcaatggcgtctgatgtcctagtcagtccatgcatcagcagatgtgggatggcatggtgggggcatcctctaacagatagaaagataccccaggattagagaaatggagggctcagtctggtctccagcaggacctttgtccctggatgagttcacagcacaggagacctgggaagacacatgggaaacaaatggcaggaacaagaagtggaattgttgtcacgttgattcctcctcccagagatccttttgttctgtgccttttcccttcaagtctaattctgtcttttccttttgttgcaatttacagatacttggccgacctcacatgcatcaacagcaggtaaataaccctctcacccctccctaggactcactatctctggacatattttgtgtttgaaactgataggatgaggctcaatgtgggcttctctgttttcatgtccctgtgggttgcgtgggaggaaggtggaatctctgaggagccagtcctgggtctgatgtttgaggacggagggtgttggtgacctgtctcccatggaatcctgttccaagtggtcaggaaagatcctcatccaggtgctcaggacgagcactggagggctccttaatgctgctgggacctcattcctggccctcaggccatgggatccagacctctgaagagcgggtgaaagtgccggtccctgcacctgtgtggccaaggccttgccatcactggcaatttgccagaaggcagagaggcccatgcaggtgccaataagctcctgaatatggagggggtctaggcctgtcatttgtagctgtgtagctccatcctgtgttcacccagagtggggagtggggtgtccattcctgtcctctcctctggggtcatacatgcttacccatagcttgagcttttatagacttgagtagaatagggcatcactttttccactatgaccaagcttaacctctgggtgcagccatctgccattgtgactgcgtgccctggtgactttggcatttgtattcaaacttgactacttttcccattgccctgagtgttgtccatgccttttccttcacctcagaatggagatggatgaaggattcttgtgttcccctgtaggatctgaatccagtttggccctgaggctggtgaatggaggtgacaggtgtcagggccgagtggaggtcctataccgaggctcctggggcaccgtgtgtgatgatagctgggacaccagtgacgccaatgtggtctgccggcagctgggctgtggctgggccacgtcagccccaggaaatgcccggtttggccagggttcaggacccattgtcctggatgacgtgcgctgctcaggctatgagtcctacctgtggagctgcccccacaatggctggctctcccataactgtcagcacagtgaagacgctggtgtcatctgctcaggtgggcctccaagaccttgggctccctctcttggggtagattttgctcaggaagcgaggtctcattatgttctgatctcctcactcagagctttttcagcctttcctatatatctgatatctccttagctctctcctaggaaactgcatgagtcttcattgccaggttttgaggaggtcaggtaggacaacgggccaaagtgaaataagggtcacgcctttgttcacctaccgaggcagcgcaagcagagggagaagaggaaagtgccaggtctttgccttttagtgtggctggaaaggaatagctggggctggtttgttcatgaggaaagaggctgatttgggtcttggctttgcaggctgcataggaccatggtgcaggcgtctgctcagcttctgatgagggcctcgggctgcttgtactcctagcagaaagggatggggaggtggcctgggcagaggtcacaaggtgagggaggaaggaagagagagcaagagggagggctcagactcttcaaccaccagctcttgctaggaactaagagaagaactcacccctgaccagggagggcactaagttattcatgcagtgttggtctccatgacccagacctggtgcatcaggcctcacctctaaacttggggattcagttgcaatataacacttggatgtgacaagcctctaaagtatagcaccctggctctccagggttccatctttcccctactgaaagattttgcaaagggttacatggatgaagcacatatagaggatgggggagggactgtctccctgggaggagcccagaaccacaggctcctgctaggaagcgcggtcttctgctgaggcccaataaggtgatgtcttaatagagacacaaggctaggagtgcggatgtgtgtctgtccctctctggcctgagatttgggggctgtgagtccttgaccacaactccctccagagcactgcagtgtcttgcctgtgcaccggtctggtgtggagtgtgcagtccccatgaggtctgctaggcaaagcattgttatgaacgcctgtgggctggactggaacatcagaggcaggactttggctggagtggcctcctcacatttgctaactcagggactgctaagacatgcaagggagagggtaggttttgtgtcaacctgattactatgggcagacacaaggttaatcaccttggagttggcaatagtggacaggatctgcccagacaccctccaaggagcatctctgtggggacatgcatggcaatgccctccctctgtgatggggacctagggtggactgaaggcatgatctgtttagttccttccacctttgttccgattttgccagcttctgtatagtgcatctgatctgacctcctctttctcacagctgcccactcctggtcgacgcccagtccaggtgagtccccagtgtccttccttgggatgtcccttctctttctgtataattatccctttctgcactccacagagccctcgttcttctctgagtgaatactacatggcatacaattttcccctgctctgtaactgagaccctggaatggcgcttctgaaccagacatagggttcaagaggcttctgtcttctgttccatttatctcagctttcatgaagcagtttcatactgtcccaatggccaacccttagaggtttaggaagtgacctcatatttaattagctttggcacttttctattcagagctgatatgaccttcctgagaattgagagtgattgccaaagtctcctgggtagccaatgtcagctaaagccttaaacatggctgccgccacaggcaagcaatgtcagtgcaggcctgacacctcccttcctcactccttccaacaccccagattctgcagggctacatgtgcatccagaagaggcataggccatgctcgggcagggagagggataataaatatttctggtgcctccacttactgggaaacttgatacccctttggtcagctccttggtttccctaacattttagctcgagctagtagagtgtcagcaatggtgttagatgtacccgtcagtgcatgtgtcagtgcatggaacaggctaaccctttgtgactgagaagaggacatcccacacttcagaggcaggagggatcgaactggtctccagcaaggcctatgacccttgctgagcttgctgagctgcagacttgggcagacacatggggagcaagtggcaggaaccagaagtggggtagttttcatgatgtttgccttctccggagacctttccttttggagattttcaccatcaactttaattctagcctttgtctctgttgcaattacagacacattgccgaccatcaccttgcctgcatcgacagtaggtaaatattcctctcgcccctccctagggctcactctctacctctggacaaatgttttttctgaaaatgataggatgagggtcaaggtgggcccctctctttttcatgtccctgtgggttgcatgggaggaaggtagcgtctctggggacccagctctgggtctgatgttggaggctggagggtgctggtgacttgtctcccgtggaatcctgttccaagtggtcaggaaacatcctcatccaggtgctgaggaaaagccctggagggttccctaatcctactaagacctcattcctgtccctcagcccatgggctgcagaggtgtgaagagtcggtggaagtgactgtccccacacctgtctggccaaggccttgtcatacctgtgaaattttcagaagtcagacaagaccataggattgccaccaagctcctgagatggggagagtctggcctgcctactgtagctgtgtagctctgtcctgtgtgtacccaggttagggaatggggtttccattcctgttaacttcagtagggtcacagatgcttccccaaaacttgagccttcataaacccaggcagaatagggtgtcactgcttctttgactttgatgaagctgaatctctgattttattcatattcaaaggtgactgcctgcccaggtgactttagccattaggacatgccttgagtgtggaacattccttagattcctgacctcatgatagggatggatgaaggattcttgtgttcccctgtaggatctgaatccagtttggccctgaggctggtgaatggaggtgacaggtgtcagggccgagtggaggtcctataccaaggctcctggggcaccgtgtgcgatgacagctgggacaccaatgatgccaatgtcgtctgcaggcaactgggctgtggctgggccatgtcagccccaggaaatgcccggtttggtcagggctcaggacccattgtcctggatgatgtgcgctgctcaggacacgagtcttacctgtggagctgcccccacaatggctggctctcccacaactgtggccatagtgaagacgctggtgtcatctgctcaggtgggccttcaagaacttgggatcactctcttggggtggagtttgctccagaagaaactcctaattacattctgatctcctcactcaaagcttcttctatgttttctatatttctgaagacttgttagctctctgctaagaatccctatgtactcactgcctagtgttcctgtggtcacttaggacaggggaccaaactcaaacaacccagagtttttccccttcctgagggaaggcaaggaagaggcagaagagaaaagtgctggctccccagggctccatttctcccctgctgagtagcacggtgtgagggtataatggatgcaggacagacagcaaggcggggtagggatcctctcactgtgaggaactctgaactaaagatgcttgtctgaaagtgggttctcagctgagacccagtgaggaggtctggaaatagaggctcaagggttaggagtgcaaatgggtgtctgattctatcacgcctgggttgtgtgaggttggagtccttgacctcaggtcctctcagatcactgctgagcattgcctgtgccccaggtctggtgtggggagggcagcccccatgaggccggccaggcatggccttgtcattgcctgtgatcagggcttgaggacggcacaagggattttggctggagtggcttcctcagccttgctgactcaagaatgcctaagacgtgcaagggagagggttggtttaggccaaccgggttaccctgggcagacacaagttgatcacctcagagctggcaatagtggacaggatctgcctcgaccccttacatggtgcatctctgtggggatgtgcatggcaatgcccctccctgtgtgataggaactaggatggactgagtgtcagactcgcccatttctttccctcctcgttccactttgccgacttctgtgtaatgttcctgatctgaccttctcttctctttctcacagcttcccagtcccggccaacacctagtccaggtgggtccccagtgtccttcctcaaaatgtcccttctctttctgcccaatcaccccttccacactccacagagctctcctgtttctctgtgtggatactgtggggcatattatttctacccccaacaccagttgtgtaactgagaccccagcacagcgctttttaaacacacacaggattgaggaggcctctgtcttcttttcaacccctctcagctttcatgaaacagtttcatactgtcccagtggacaacccttacaggttcaggaagtggccccatgtttaatgagctttggtccttttatattccggactcacatatagtttctgaaaattgtgagtgtcaccctctgacctgttcaaggcatcatcagggcaggctcgatacccccatccttcactgctggaaacattccgagattatcatgggccacatttgtatccagaaaaggcagagtttgtgcttgggcagggagagggataataaaggtttgtgatgtcactgcttaaccagaaacctgattcctgattgtcccctgggcagcccctggttcccctaacattttatctgccagtgtccgagcctcagcaatggcgtctgatgtcctagtcagtccatgcatcagcagatgtgggatggcatggtgggggcatcctctaagagatagaaagataccccaggattagagaaatggagggctcagtctggtctccagcaggacctttgtccgtggatgagttcacagcagaggagacctgggaagacacatgggaagcaagtggcaggaacaggaagtggaattgttgccaggtggattccccctcccagagaaccttttgttctgcaccttttcccttcaagtctaattctgtcttttcctttgttgcaatttacagacacttggccaacctcacatgcatcaacagcaggtaaataatcctctcacccctccctagggctcactgtctctggacatattttgtgtttgaaactgataggatgaggctcaaggtgggcccctcttttttcactcccctgtgggttgcgtgggaggaaggtggaatctctgaggagccagtgctgggtctgatgtttgaggatggagggtgctggtgactgtctcccatggaatcctgttccaagtggtcaggaaagatcctcatccaggtgctcaggatgagcactggagggctccttaatcctactgggacctcgttcctggccctcaggccatgggatccagatctctgaagagcaggtgaaagtgccagtctctgcacttgtgtggccaaggtcttgccatcactggcaaattgccagaaggcagagaggaccatgcaggtgccaatgagctcctgaattcggagggggtctgggcttgtcatttgtagctgtgtatctccatcctttgtgtacccagagtggggaatggggtgtccattcctgtcccctcctctggggtcatacatgcttacccatagcttgagcttttatagacttgagtagaatagggcatcactttttccactatgacaaagtttaacctctgggtgcagctatcttccatcatgactgcatgccctggtgacttctgcattcgtattgaaacttgactactttgcccactgccctgattgttgtccatgccttatccttgacctcatatttgagatggatgaagcgttcttgtgttcccctgtaggatctgaatccagtttggccctgaggctggtgaatggaggtgacaggtgtcagggccgagtggaggtcctataccgaggctcctggggcaccgtgtgtgatgactactgggacaccaatgatgccaatgtggtttgcaggcagctgggctgtggctgggccacgtcagccccaggaaatgcccggtttggccagggttcaggacccattgtcctggatgatgtgcgctgctcaggacatgagtcctatctgtggagctgcccccacaatggctggctctcccacaactgtggccatcatgaagacgctggtgtcatctgctcaggtgggcctccaagaccttcggctccctctcctagttggagtttgctcaggaagaaaatcctaattacattatgatctcctctgaactcacagattcttctatgtttcttgtatttatgcagccttgttagctccctgctaagaatctgtatgaattttgctacagcggttggtgttcatgtggtcacttaggacaggggaccaaagtcaaacaacaacccagactttatccccttcctgaggcagtgcaaggaagaggcagaagagaaaactgctggctccccagggctccatttcttccctgctgagtagcagtggttgagggtatcatggacataggacagacagcggggcagaggagggatcctctcactgtgaggaactctgaaccaaagatgcttgtctggaagtgggttctcagctgagacccagtgaggaggtctggaaacagaggctcaagggttaggagtgcaaaatgggtgtctggttctatcaggcctgggttgtgtgaggttggagtccttgacctcaggtcctctcagaacgctgcagagcactgccttgccctgggtctggtgtggggagggcagcccccatgagactggccaggcttggcctcattattgcctgtggtcggggcttgaagatcacacaagggattttggctggagtggcttcctcagccttgctgactcaggaacacctaagatgtgcaagggagtgggttggtttaggtcaactgggttaccctgcgcagacacaatttgatctcctcagagctggcaatagtggacaggatctgcctcaaccccttacacggtgcatctctgtggggatgtgcatggcaatgtccctccctgtgtgataggaactaggatggactgagtgtcagactcgcccatttctttccctcctcattccagttttgtcgacttctgtgtaacattcctgatctgaccttctcttctctttctcacagcttcccagtcccagccgacacccagcccaggtaagttcccagtgtccttcctcaaaatgtcccttctctttctgcccaatcaccccttccccactccacagagctctcctgtttctctgtgtggatactgtggggcatattatttctaccgccaccaccggctgtatttcacatgggtccttttctattttccctaagtgtcagccggtctgagaaataaagggaaggcatacaaaagagcaaaattttaaagctgggtgttggggggagacatcacatgtcagcaggttccgtgatccctcctgagtagcaaaaccagcaagtttttattggtgattttcaaaaggggagggagtgcacaaatagggtgtgggtcacagagatcacatccttcacaaggtaataaaatatcacaaggtaaatggaggcagggcaagatcacaggactggggtgaaattaaaattgctaatgaagtttcgggcacgcattgtcattgaaaacattttatcaggagacagggtttgagagcagacaactggtctgaccaaaatttattaggaggcaatttcctcatcctaataagcctggaagcgctacgggggaccggggcttatttcatcccttatctgtaagcgtaaaagacagacgttcccaaagcggccatttcagaggcctccccttaggaacacattctctttctcagggatgttccttgctgagaaaaggaattcagcgatatttctcctatttgcttttgaaggaagagaaatgtggctctgttctgcctggcccacaggcagccagcctttaaggttatctcccttgttccctgaacaacgctgttatcctgttcttttttcacagtgcccagatttcatattgtttaaacaatttctgcagttaacgcaatcatcacagggtcctgaggtgacattcatcctcagtttatgaagaagatgggattaagagattaaagtaaagacaggcataggaaatcacaagagtattgattggggaagtgataagtgtccatgaaatcttcacaatttatgttcagagattgcagtaaagacaggcgtaagaaattataaaaatattaatttggggaactaataaatgtccatgaaatcttcaaatttatgttcttgtgccatggcctcagccggtccctctgtttggggtccctgacttcccgcaacacagcacagtgctttgaaaacacacataggattcaggaggcctctgtcttcttttcaacccctctcagctttcatgaaacagtttcatactgtcccagtggacagcccttacaggttcaggaagtggccccatgtttaatgagttttggtccttttatattcaggactcacatatagtttcgaaaattgagggtgtcaccctctgacctgttcaaggcattgtcagggcaggctcgatacccccatccatcactgctggaaaaattctgagattatgatggaccacatttgtatccagaagaggcagggtttgtgcttgggcagggaaagggataataaaggtttgtagtgtctctgcttagccagaaacctgattcctgattgtcccctgggcagcccctggttcccctaacattttatctgccagtgtctgagcctcagcaatggcatctgatgtcctagtcagtccatgcatcagcagatgtgggattgcatggtggggggcatcctctaacagatagaaagataccccaggattagagaaatggagggctcagtctggtctccagcaggacctttgttcatggatgagttcacagcagaggagacctgggaagacacatgggaagcaagtggcaggaacaggaagtggaattgttgccaggttgattccccctcccagagaaccttttgttctgtgccttttcccttcaagtctaattctgtcttttttctttgttgctatttacagacacttggccaacctctcgtgcatcaacagcaggtaaacaatcctctcacccctccctagggctcactatctctggacatattttgtgtttgaaactgataggatgaggctcaaggtgggcccctctcttttcatgtccctgtgggttgggtgggaggaaggtggagtttctagggagtcagccctgggtttgatgtttgaggatggagggtgctggtgactgtctctcatgggaccctgttccaagtgttcaggaacgatcctcatccaggtgctcaggacgagcactggaaggctccctaatcctgctgggacctctttcctggccctctgaccacgcactgcagacctgcaagggtgggtgaaaatttctgtccctgcagctgtctggccaagtccttgccatccctggaaatttgccagaaaccagagaggaccatgtggatgccaccaaactcttaaacatggggccagcatgggcctgctctctggagctgtggagctccatcctgtgtgtgcccagagtagggagtggggcattcattcctgtcacttccagtggggtcacaggtgcttccccaaaatctgagcctccataaacccaggcagcatagtgtatcacctctcctttccctatgataaagctgaacctccggtagcagttgtatgcaattgtgactgcttgcccaggtgactctggccattaggaagtaccctgagtgtggaacttgccttagattgttgacctcctggtggggatggatgaagggttcttgtgttcccctgtaggatctgaatccactttggccctgagactggtgaatggaggtgacaggtgtcgaggccgagtggaggtcctataccaaggctcctggggcaccgtgtgtgatgactactgggacaccaatgatgccaacgtggtctgcaggcagctgggctgtggctgggccatgtcagccccaggaaatgcccagtttggccagggctcaggacccattgtcctggatgatgtgcgctgctcaggacacgagtcttacctgtggagctgcccccacaatggctggctctcccacaactgtggccatcatgaagatgctggtgtcatctgctcaggtgggctttcaagaccttgggctccctctcttaagttgaagtttgctcaggaagaaaatcctaattacattctgatctcctcactcaaagctttttctatgttttctatatttctgaagtcttgttagctctctgctaagaatctttatgaattttgctacagtacctggtgcagctgtggccacttaggccagggctccgaactgaaacaacaacccagactttatccccatcctgaggcagtgcaaggaagaggcagaagagaaaagtgctggctccccacggctccatttcttccctgctgagtagcactggttgagggtatcgtggacacagcacagatagcaggggcagggagggatcctctcactacaaggaactgtgaactaaagatgcttgtctggaagtgggttctcagctgagacccagtgaggaggtctggaaatagaggctcaagggttaggagtgcaaatgcatgtctgtttgtgtcaggcctgcttggagtccttgacctcaggtcctctaagaatgctgcagagcactgcctgtgccccaggtctggtgtggggagggcagcccccatgagtctggccaggcatggccttgttattgcctgtggtcggggctgtaagatcacacaaggcatttgggctggagtggcctcctcagccttgctgactcaggaactgccaaaacatccaagggagagtgttggttttgggtcaacctggtcaccctgggcagacacaaagttactcacctcggagctgacaatagtggccaggatctgcctgcaccccttatatggtgcatctctgtgggaatttacatggcaatgcccctccctctgtgatagggactaggatggactgagtgtcaggcttgcccagttccttctatctttgttccagttttgccattttctgtatagtgcatctgatctgaccttctcttctctttctcacagctgctcagtcccagtcaacgcccaggccaggtgagtccccagcatccttcatcgggatgtcccttctctttctgcccagttacctcttccccactccacagagctctcctgcttttctgtgcggatactgtggggcatattatttttcctcccaccactctgtaactgagaccccagcatagtgcttcaacagacatagggttcaggaggcttctgtcttctgttcaatttatttcaggtttcatgaagcagtttcatactgtacaatggacaagccttacaggttcaggaagtggcctcatgtttaatgagctttagctcatttatattcagagctgatacaacctttctgagaattgagagtgactgccaaagtcacctgggaaggcaatgtcagttcaagccttaaacatgacttctgccatgggcaagcaatgtcagtgcaggcctgatacctccgtccctcactccttcaaataccccagattttgcaaggccatatctgcatccagaaaaggcagaggccatgctcgggcagggagagggataataaatatttctggtgcctccacttatcaggaaacttgatacccctttgggcggctccttggttcccctaacattttagctcgaactgtcagagtctcagcaatggtgtcacatgtgcccatcagtccatgtgtcactggatggggcaggctaacccttcgtagctgagaagaggacatctcacacttcagaggtaggagggatcgaactggtctccagcaaggcctttgttcctggctgtgctcactgagctgaagacttgggtagcacttggagcaagtggcaggaaccagaaattgaatagttttcatgatgcttgcctggttcagagatttttttttgtagctttcctccctcaagtctaattttgtcctttctctttgttgcaatttacagatacttggctgaccaccaacttaccggcattgacagtaggtaaataatcctctcgcccctccctagggctcactctctacctctggacaaacgtttcttttgaaaatgaaagaatgaggctcaagctggcgcctctgtttttcatgtttccgcgagttgcctggggaggtagactccctgggaacctagtcctgggtcagatgttggaggctggagggtgctggtgacctgtctcccctgggattctgttttatgtagtcaggaaagatcctcagccaggtgctcaggacaagccctggagggctccctaatcctactgggaccttgttcctggccctcaggccacaggctgcagacctgcgaatagtggggaaagtgcctgtccccatagctgtctggccaatgtcctaccattcctggcactttgctagaagccagagaggatcatgtgggtgccaccaaactcctgaacgtgaggcaggtcttggcctcctatctggagctgtgcagcttcatcctgtgtgagaatggagctcagaatgaggagtgaggcgtccattcctgtcacctccagtggggtcacaggtgcttccccaatacttgagcttccatagacttgggtggagtaggacatcactgcttcttccactatcatgaagctgaacctctgtctgtattcatattcaaaggtgattacctgcacacgtgactttggccattaggaagtgccctgagtgtggaacattccttaaatccttgacctcataatcagtatggatgaagggttcttgtgttcccctgtaggatctgaatccagtttggctctgaggctggtgaatggaggtgacaggtgtcgaggccgagtggaggtcctgtatcgaggctcctggggaaccgtgtgtgatgacagctgggacaccaatgatgccaatgtggtctgcaggcagctgggctgtggctgggccatgtcggccccaggaaatgcccggtttggccagggctcaggacccattgtcctggatgatgtgcgctgctcagggaatgagtcctacctgtggagctgcccccacaaaggctggctcacccacaactgtggccatcacgaagacgctggtgtcatctgctcaggtgggccttcaagacctggggctccctctcttggggtggagtttgctccagaagaaactcctaattacattctgatctcctcactcaaagcttctcctgtgtttcctgtgtttttgaagacttgttagctctctgctaagaatccatatgaattcactgcctagtgttcctgtggtcacttaggacaggggaccaaactgaaacaacaacccagactttatccccttcctgaggcagtgcaaggaagaggcagaagaaaaaatttctggctccccagggctccatttctcccctactgagtagcactgggtgagggtatggtggacacagcacagacagcggggcagaggagggatcctctccttaggaggaggctcatggtaaggaaaggacatatgttggggtagggaattctcacttgaggccccagtaaggagcatttggattggaggcatatgggctaagagtgcaaacgggtatctgtgcatgtgtgacctgggtcttggtcagtttcagctccttccaaagaactgcagtgcattgtgtgtctagcaagcatggtgttgggagggcagctcccatgagatctgccaggcaaagccttgttattacgtgtggtttgggatggaagatcacacaggggatttttgctggagtggtatcctgagacttgctgacttggtgaattgctaaaacctgcaagggaaagggttggttttggttcaattggacatcacatccagacacagagttaattgccttggagctggaaatggtggacagaatctgcttggatcccttataaggagcgtctttgaatccagccaaagcactagcattcagcaggtctgggtgaaactcctgggtcttgcttgaagcctctggccgctccctacctcaatcaatgtggtatctaccagttgtcaattgatctttaaagaggatctattattagggatgcttttgtttgcacatggcaggaactcaactcaaacactcttaagctagaaaggaattcattgtctcagttatccagaatgtttagtggtggatctggagcttcaggtacagctggttccagaagttccaagtcttttttccccatgctttgcttacatctactcttttatctgtgtgggcttcactatcaacttgctttttgcatgtggctgagagacagcagtgggcagccccaagtctatatcccaccaggagaaggagtcagtctgtcccagtacctctggctgacaaggcctgggaggactttgattgacctgcttgtaaacaggtgctttcttccaaaccatctctattagctctgacggctcagccagagttctatacccatctttgtgttcctttggggcgacgggaaggatgggggcactaggctctacttgaatcttgtaggatgctactttttaaaataggaatgactgtttctattagaataaaaaacaggcaggatgtttgtgacagagatagccatccctcagttggacccttcctttcttttgatactatctgctctttgctggttgacgttacccctctatcctgagatggaaccttccctctccctggctgttgcccatgttcattaccatcatctctatctagttccaggactttttcattatccccaactgaaagctcttaccccttaaccattcataatccatttctctttccctcagcccctggcaaccactaatctgctttctgcctctgtatacagattttactaagaattgtggtcactttctatgaatggaatcatagccttttctgtctggcttcattcacttaacataatgttttcaaggttcattcatattttagcatgtgtcagaactccactacttttaactgccaactaatattccattgtatggctacgccatctttgtctatccatttatcagcttatggacatatgggttgcttccatcttttggctgttgtgaataagtctgctatgagaattagtgtacggttttttgtttgcacttgtgtttccaattttgggagatatatacctaggagtgggattgctcggtaatagggtaattatgtttaatttattgtggaaacactgaacagttgccacagctgctgcaccaaatttgcattcccccaagcaatgcctgagaattctgattcctccgtatcctcaccaacacttgttatgatgtctttttcatcatggccatcctagtgggtgtaaggtggtatttcatggtgttttgatttgcatttccttgatgactaatgatgttgagcatcttttcatgtgttggtgggccctttgtatatattcttgggagaacaggggcttcattttatagatactaagctgaaggccagaggaactagactaatgtcagtatcttagcccaggctcacaggacagggttcaggtacacagagggatcaggatgcctggcccagtgttgtgtctagcatgtgacattccttcatggaggcctaactctgccattttttctccattctcaggcataggcactgctaggtatgcacaactaagtgtcctcatagttgcttctgcccactgtccctgtagctcatggtattcagtaggtccaggttttgtttcagattgaaggcaagctgtgggtttgaaagtgactcaggaataagcctcgggcctgatggggtggtccctgtgagcagagtgagtcagccagaggtggagaggtggactctcccaagaaccaggtcctagggctgcaccttgccaggcagctgggagctggtctcggttgcatcctgctgcaggggcacttgagcccagtggtccctgcagatccatgctgatggctcctgcactttaacctctgaatctgaaggcctggctcagcacttgaattgctggtcactggggtaactccatcagagaacatgcacagctcagtccacacccaagggttctagaaaacaacccttaagttgatgaagaacatcaacttaaaatgatgaagaacaggcttccgtcaatgtctatgctgctggagaacattaactggagacccagaaaccttggccttctggaagaattctgaacttcacttgacctcagatcctcttcctttaggagatacaggagagagttaattttcctgtcttttctagaatccaattctggtttggccctgaggctggtgaatggaggtgaccagtgtcagggccaggtggaggtcctgtaccaagtctcctggggcaccgtgtatgatgacaccaatgacgccaatgtggtctgcaggcagctgggccgtggctgggccgtggcattcccaggaaatgcctggtttgatcagggctcaggacccattgtcctggatgatgtgtgctgctcagggaatgagtcctaactgtggagctgcccgcacaatggctggctctcccacagctgtcagcacagtgaagatgctgtgtcatctgttcagatgggcctccaagaccttgggcctctattttagtgtgtggttttctccatgacaaggcttctctttgcactggcctcttcccagcctgagcttctcttcaagatggccagtttctctgatacctcagcaaggcaataacctcagcaaatgttgttggcgtctttgaattttatgggtaggcactagcttctttcttatgtaggttcctatagcaaacaagggttcaatctactttcaggctgtaagaatgaattcttccaacatctttttttgagactaaccgttaaggtttatatctactattccactctcctggatgactcttggggagcatttctaagtgatgagatggggacaggcactcagcatttctctcgctcatcatcctgggcactgggactgactcatgttttcttcttttccttgcagccacccaaataaattctactacgacaggtgagtctgctacaccccagtccagcaatatttctcttgggaattccaccctctcttgtttccagaagtaggaggagtagggtagactccccctgggggggtaatttctctctgaggactctgatctttgttagggtgacgagctgagttcccactgccatcactctcatgtctggttcaccgtggagggcccctgtggcctcctgctattgcctgctgatagtgctaagtgctggcagagatgctgctgtggaaggaggctttggtcctcccattatttcagatgaaaataactgtctaaattaacccatggaaaattaggaccttcattttagaaacatagccaagtaatacttctgcacgtatttgtcaaataaagaacactttcactttgagggagccatccgcaaagcgtttttgtgccacagtgaaaatatcctgggccaaatatgttgggaggtgctacatactctagaccttactggccatgaacagtgtaaactggaatggtcaaggctctgagaagtcctgtactaaggaaaaggatttaactttgtcagtcaaacaaattactatggaatggaaaaattatctactaaaatcctaaacagcttcatttttttttctagattggtggcatccaacaactacaaccactgcaagtaggtatcacattttctacctgaaccataggtcatacatttcttatccccaagcttggctatccatgagcgaatgctctgccccaccccagccttcctcaatctgcacatagccctggcctgtcccactatacccttcacctcttcatttgaatcaatgagataagtattcttaaaataatagacttaaaggcttttattttggggggtatctccaaagctttaggaggaagaagggagacaaatagtaaatggataattttactacaaattatgcttttccatgtcatttttatttcaccatatggctatgtttcaatagattttcattgcttttaaaaaataatagggatacttttctgtgttattaaatcttttctcacaatcattttaagtccctgtattgtattctattatacagatatgccatgaattatttgacaaatcatcagatgctagatatttgtttgtatttcttcattactgtaaatgattttgtgatgaagaatatttttatagataatttttttgcatacctcactaatttttcctttaggatataaatgggtttactggaccaaagtcaatgtcattgtagtgcctggtacatagaatgtacttcatgcatattaacttttactgtgttaggtattttaagatcttgctgtgtgtatggtcaaactaccatcaagaatggttgtaaaattatggaatgatgtaagagacaaactgatcttcttcctcagagctcacaatattattttgtacacaacaaactagaaaattacagttgtgacaactgtttccaaggaaaagttcagtgtgcaaagaggaagtattagtagagatcttccttgattggggagttaggggaagttccttatggaagtgacatttaagctgggagttaatagaggagcaggttcatttgctgaagtgtcttctaaccagaagggatgctttgaaggccctagggtgggaaggagcttggctctttgaaggagggtggggtgcgggcaaggagggactgcaggaaatctgtcgggtgaggccagatcattcagggccttgtgggtgggttaagactcccatctttatcctaaaggtagggaggctgcagaaagattttaatcttgagaattagctaattggaaatatatttgcaaaagatcatgtttatcttttctgccaaactgcatttcctgaaggcaggggccatgtctgcctttttcataatgtatccttattatctagcattgtgtctgcctttcaagaactgtttattgaaggaataaatgagtgaatgaatgaatggataaattaatgaataaatacataattactgttggcattttggcatacattccatacactgtatacacacacacaaacacacacacacacacagtatggcatgctttatatcccattgtataacccatcattttcatttaagtgtatataatacttttttcatgaccttaaaattagcatttttataacattgaaattatttgtatagaagaaggtttaatgactatatgattttccactgtatagatatatcatcatttagttaaacggttactaattgtggggcaaaaacattgtttccaattatattttataatgttaagtgactatatacaatagcatattttataaccatttatatttaatgattagaaatatgtaactcgtatccttgtctctgaaagtttgactttatccttaattatttcccagtgtagaaatagaaagggagggcaggccacatgatcttcaagaaacactgtcttcccatcaaatgggagaacgtatttctatctcataagggacttgtatctaggatatataagtgactcttgtagtcaatgataaaaagtcaaataacccaactgaacaatgagcaaaagacctgaaagatatttctctacagaagattcacagatagcagagaaggcattggaaagatgctcaatgtcattagccgtcagggacatgcaaatgaaacacccagtaggtgggctgtagtcaaaaagccagataatagcaagtgttgatgaggatgtggagaaattggaaaccttatgcacggctgcagggaatgtaaaatggtacagccactttgagaagcagtttggtggctcctcgaaaggttagacctggagtcaccatatgacccagcagttgtattcctaggcatatacccaggagaaatgaaaacatatgtccatacagaaacttgtatgtgaatgttcaggacagctttattcatagtagccaaatgtgaatgcaatgcaaatgtccatcatggtgaatcgagaaacaaatatgatatgtccatgcagtggagtattatttggcaataaaaatgaatttaatagtggccgggcgcggtggctcatacctgtaatcccagcattttgggaggccaagatgggcggattggctgaggtcaggacttcgagaccagcctggacaacgtggtgaaaccctgtctctactaaaaatacaaaaattagctgggcatagtggtgggcggctgtaatcccagctacttgggaagctggggcaggagaatcgcttgaacccgggaagcggaggttgcagtaagctgagatcgtgccactgcactccagcctgggtgacaagagcgaaactccatctcaaaacaaaacaaaagaaaaaaaagaatttaatattgatttatgctacaacatgatgaactttgaaaacacattgagaagtcagtcaaaaaaactaccatattgtacaatttgttttatatgaaatgtccacaataggcaaatctatagagacagaaaagtagatcagtgggtgccaggaatggagggtgttgagaagaaatggggagtgattgctaatgagtacagggtttctttttggggtgatgaaaataatctaaaattgactgtggtgatttcagagctctcagtatgctaaaaaccatggacttatccccttagaaaaagtaaagaaagagttatgaaaaagaaaaaaaaagacgttttaatttctatcactgagtgtgcacatgtttttaaaaagtttttattactataaaccaaccaacaaaatgtttgaccacttaatatttatccttttctgataaataacaatagctaatattgctgggtgcttatgtgcctggcactctctaagagtttatatagacatagaaacctatcttatgtttatgtataaatgttcatatatacatatcttatttaataccctcatcagacagatgaggcagatgccattaccactctcatttttctgatgaggaaactgaggcagagaggttaagtaactggctccagatcatggagctgatagaggcagagccaagatgcaaacccaggcttcttgttgcagaaaccctgctcctaacccaacgttgtgctacttgtgaattggcagagtcctgtgctcatggaagacgctagggaacacactgtgttatggagtgctctccacgggtcagcactgtgttcagccaggactatcccacgtccctgtctgtagctgattgaacaatgatagctgtcactttgttgctttcttggcatttttgctagaggtgacacatgctccctctgaagcttgggtcacctcctcgcagagggttgctgtccaggcctaacagggaaagcagggacttgaatcaaagcttctaatgttgggccacctagaaccaggcccaagagaggggacttgtttacagggaaagttaagtcttgttataaagtgcagaagatgaaactggatgatacttacacagatgattccttgtcacaaaatacctgaagacctggtacaatggagatgtcccctctctcctctctaggaccctcttcaaattgtggtggcttcttattctatgccagtgggacattctccagcccatcctaccctgcatactaccccaacaatgctaagtgtgtttgggaaatagaagtgaattctggttatcgcataaacctgggcttcagtaatctgaagtaagtaatgcctggtcatctggtgaggggtgagttcctctgcagcacacccactggtttagactgtgtcctgggctgggatgcttttcactctcatgtgccatggacaagcttttggtggctttgattcctaccataaagcatcagggaacactgatgtcctttgacttaattgaggaagagctagaagaaaaacctgtattcaatggcatccctcgtaaagtgcaaactatttataaaatggaggggcaataggaatttcaatgttgacttgaatacattttctccatacagattggaggcacaccataactgcagttttgattatgttgaaatctttgatggatcattgaatagcagtctcctgctggggaaaatctgtaatgataccaggcaaatatttacatcttcttacaaccgaatgaccattcactttcgaagtgacatcagtttccaaaacactggctttttggcttggtataactccttcccaagcggtaagtgcacactagaccatgcctatgaggcttggtggatttacccagctgcctctttgggggcaccatggttccccaaggaaatcaaagaagggcctcagcgatgcacggcccattctctttctcttggcactgactgtgtgggcaggcccttgggaaggcagcaaagggtgcagactgggggttccacctggccttgggtctgccaccaactctccaggggacctggtgactctccttcagagccacccctctccgtctggaggtgaggggatctgagcttggcgatgtctagagcccctttcagctctgcatggagcggtccagtacctccaccccagcttttccacatttctatttggcgactttagaggtgggaaaaggcctgtgggatgcttggcctttgaggtttgttgtgggacatttgttgtgggacatggccatgatctctcagttaatgtgtctttcagatgccaccttgaggttggtcaatttaaattcatcctatggtctatgtgccgggcgtgtagaaatttaccatggtggcacctgggggacagtttgtgatgactcctggaccattcaggaagctgaggtggtctgcagacagctagggtgtggacgtgcagtttcagcccttggaaatgcatattttggctctggctctggccccatcaccctggacgatgtagagtgctcagggacggaatccactctctggcagtgccggaaccgaggctggttctcccacaactgtaatcatcgtgaagatgctggtgtcatctgctcaggtatggcccaatgccatggaaggcccatttcacctgtaacttgctataaagcaagagcttaaggccagtggctgatggtgtctgtggcccaggcaggagctggtcattgtgtcctcgtggcctgcgcactccagaagagcatgcagggggctgctttatctttggccagtttctggacccagggccattatgctgaacactcatctgactaaaggacctccagcaatgattttacttctttatgcttcagtttccttgactgttgagtcggggtggctatgatagtacttgctactggtgacaattgggatggttttagaacaatcatggtcaaggagagagtgatgggtgttatgacctcagctgtaatcctgatgaccacaagtatgacgggacttagggagcatctggggaagctgggaaggcttctcaatagcaattgctgggtggacctggggaccctcgccgaggggggtcaggttatgggccatgtaagtgtatctctgtctcattccggcccctcctccaagccacatgtctgtgacctatgctttttttctattcctttttcaggaaaccatctatcgacacctggtaagtccctccgatttccattccacttccctggtctccaggtctctccattactgctgcctagactgtgcagggcatgttgctcactctccaaggagttcatctgtggtaccatcctctacagcccctgtcccctcccctgccggccaccaggatagtgtgcccctctctgtgcttcagtggcctgacccacctaagattaggatctccagtcagtcccgaggtgaggcccgccacctgtcagatttgactgtcctcacagacaccagaccctgaccagtgttggccaaatggggcccactgcatcgcagagctcctccctgcctgcccctgagctgctctgagtgttcccagcatggccctggcacctctccaacaccccccactgccccgccccctgcttgctttgtcatcccctcctggcctcccatagcagcagcttcaggcctgtgccctcccatccattctccactgtgcagccccttcaagagattcctcagggtcttctggtgatgaccccgctcctcagcacagcatgactgccagggctccccatgatctgctccctatgcttggtgccctctccccatcctctgcctgctccatctacacggaggttcccaaatctattccacccaggtgcagttgcacctgctgttcctctgcctgggacaccccgtttctacctctttgcctgccccctaattactgcccttttttccccactccatctggggcaggggccagacttccaggctcctctccttccccaggctttggtcaatctcatccttttcccagtgtgctgggattcgctctcctccagacctccccaaaggcaagtgagctccccaagggcaaggcctgtgtccagctcctccctgtggactcaggcttggcacagcatctgcacagctcatgagcagtcgacagctgtgtcagggatgccagaaaactgatcctgatcttttctttttgtcaacagctccttttctcaacatcacccgtccaaacagtaagttctgagctccctgacaagtctgtggcagagtggcctggaaattccccttcccatttcctcagtgacaatggggctggggaggagatggcttcccccaaagtggtctccctgcaagagtgccctgccagccctcagtggacggtccagatctaggccacctcttgctcttacttggtttctgtcttgggaattattttataaaattttaaagtaatttaaatttaaagtagtccgcaggtagactgtgcagtgtgctctgggggtcaccgacattcccactttttgtcctgacagcagattattcctgcggaggcttcctatcccaaccatcaggggacttttccagcccattctatcccgggaactatccaaacaatgccaagtgtgtgtgggacattgaggtgcaaaacaactaccgtgtgactgtgatcttcagagatgtccagtaagtgtgcgcccagaagaatgccttggggccccacagacctttcaagagggaataaatggtgcttaagtgtgcgcccagaagaatgccttggggccccacagacctttcaagagggaataaatggtgcttagaaagccaggagagaagtttgctgagagacatttttgacctagcccagaggcatcccgtggagagttggggagggggcacgagagccttggagtggacaaaagctctggtttcaagtcctaggtctttcaccaatttgctgtgtgaccacaggaagtcactcaactttcctgagcctcagtcaaaagaggggaataaaatacctgctttcctcacctcactgtttactgggaaggtcacgagaaacagagaggagagagagggagagagatgtgaaaatatttacaaaatgttgtccagtggaaaagatggttgttaagtagtaatgatagacttaggggcaataatagcactaataatcctattaacaaccacactggccaggtatgctgcctcagggttgtaatcccaacactttgggaggccgaggcaggaggatcacctgaatgcaggagttcaagaccagcctgagcaatatagggagaccccccatctctacaaaaaagtacaaaaattagctgggtgtggtggcctgcacctgtagtcccagctactaaggaggctgaggtgggagaatcgctagagccctgggagttgaaggttgtggtgaactatgatagcgccagtgcactccagcttgtggaacaaaacgagaccctgtctcaggaaaacaaaacaaaacaaaaagaacaattgtatctgttttgtggaaccctttttctccacccattcctttcttcatgtgagttccccaggggtcgggcagagatggaggaattgctgctccagagggtagggtatctgctctgcatccaatcataagtagaaatcatcgttttaagcagagaggacattactaaaagcacttttctttctttctttctttctttctttctttctttttctttctttctttctttctttctttctttctttctttctctctctctctctctctctctctctctctctctctctctctctctctctctctctctctctctttctctctttttctttctttctttttttttccggacatggagtctcgctctgtcacccaggctggaatgtagtggcacggtctcggctcactgcaacctctgcctcccgggttcaagcgattctcctgcctcagcctttcaagtagctgggcttacaggcacacgccacaatgcctggctaatttttgtatttttattagagacggggtttcaccatattggtcaggctggtcttcaactcctggcctcaggttatcctcccacctcggcctcccaaagtgctgggattacaggtgtgagccaccatgcctgatgtcaaaagtacattaatatatgatttatccaaggaggcgggtggcccagctaactgtgaagaggcaccagtgtttgctagtgtcctgaacaaggggctacactaatttcttctctaacagccactgttgaacaaaatagttttccctgttgatttctgtttgcagtgggctttggagtctctgctttagtgattcatttgggattttgcaaaagatacatcattttattctctttgtcattacaatacaaagattgcacttaaagctgatgcagtcctatgggaaaaggttgaccatgactggttctttaaccagcatcttgatagcaatgaccatcaccatttgtgacattttacaaagcccttttctgtatgttgttttatttgagcttcaccatagccctcttcagtgtgcatggatcagattactttgcctttgtaaataggaaaagctttagagagattatttgacttgcccagtatttatttattcaattatttatttctctcactatgaattcatgcatattgattttattctgtgggggcactagggacttttcgatggaagaaaaatggtctaaatcaggatgcgagcccttcctttcctgatgtaaagggctgacaggtgaggggctgtagatttcatatgtgtgattgcaaagggcaggactaagacccaggcatggaggttgagggaagatgagactctcttgatttaaggatacctatgactttcttttgtttcaatttttatttttctttttattttttgagacagggcctcactctgtcgcccaaactggagtgcagtggcacgatctcggctcactgcaacctctgcctccttggttcaagtgattttcctgcctcagcctcctgagtagcctccctcaccctacaggcttgtgccaccacgcccggctaatttttggatttttagtagagacagggtttcaccacgttggccaggctggtctcgaacttatgacctcagatgatccacctgccttggtctcccaaagtgctgggattataagtgtgagctactgcgcccagccaaggagacctatgactttcatcgatgaactttgtcagagtttctggcacagaggtgtgaccccaccctgagatctgaccccctgcgtcaaattctgggaggaaatgaagccaaatggtgtgtcctctctctgcaggcttgaaggtggctgcaactatgattatattgaagttttcgatggcccctaccgcagttcccctctcattgctcgagtttgtgatggggccagaggctccttcacttcttcctccaacttcatgtccattcgcttcatcagtgaccacagcatcacaaggagagggttccgggctgagtactactccagtccctccaatgacagcaccagtaagtccccttgtggaaatgctctgttgggactggggacatcctgagagcatctgtggctcaactgtcctgttgttgtgaaataagaaatgaaggaaccctttcaggtcaccagggcttgattttcagctgaaagggaccaggagcagtgggacttgggactctggctgcccagaaataaagtcagggctagaactggctgatgggtgatgattggtcttactgtggtcagcagagactaagtagagggtcccagatgatgctcttcgtggagagtgatgagtcagtgccaaaggcagaggtgacctcttggcttgaaaccttgtgaccttctcagagtgtgggacactgtggccatggcctgagacctaacacatttggtttctatctgaagatggactgagctgggtggctggaagtggctgagataaggtcactcagacacttccagcagagcctgtatggccatgatttgagttgctgtatggactgatatgtagaatggccaagggccaggcaaggtgacatccagggtctcttatgcagtcaggattaaagactgacttgcttcatggctaaaagaccttgtttcatgacattcccacaatttgatcatacagttactttactttatagataaatggtaacttggccaaacataccacttatttaaaaatcctgcctccaattctccatcagagaaatcctgagtccacgtgctctccttgggctttcataaggatggggctgacttgaccctcgggtccttgggggattgcagtgaggtctatgcccacatcctaagtgctgaccctccctgtcagccaccctggtctgtgcactttttaagtggaaacagcctctggccccgtaggacttgtggagtctggggcagtgactgagtgccttatctgtccttgtctatcagacctgctctgtctgccaaatcacatgcaagccagtgtgagcaggagctatctccaatccttgggcttttctgccagtgaccttgtcatttccacctggaatggatactacgagtgtcggccccagataacgccgaacctggtgatattcacaattccctactcaggctgcggcaccttcaagcaggtaagcctggggcttcccattccatttcccagtgcacaagctttcttagagcggtatgtcctgtgcttcttgaattctggggatgaagaaattatgattttgggataatcaggacataattggaataaaggaagataaaaaacctttggtgctatgatatggctgcagctacttccaaataggaagaaggaagctgagcagaaagagtatctccagctgtgtccagcagagagggcttctggcagaccgccactcccatcagcaataacaacagcagctcctggagcaggtccagattttgcagggcctgaagcttatacagttagggttgggggtgagaggcaggtgttgagatgggcaggggcctcattaagtcaaagaatgcaatatctatgaacttttataaactttgcaaaaacgtatggctgtgcaaacacattgctaggccttggaggaggcctgcacattgcagtaggcagggaagagggggcccaaaagcttcagcttcattagctccatagtcagctggcctctgcagctaccatttgttgagctatcaccatctaagatggccccctgcatccaattttgggtgaaagtgaagccaatatggtgtgtcccttctctacaggcttgaaggtggctgcaactatgattatactgaagttttcaacagcccctaccaccgatttctgtggtttgcctgggactttgcagattttagcatagaaagtcccacgttccaggaaacccctcactcccaggcaaatgaggacggttagtcaccctacaagtggcagatgctgtgattggtccttgtcatactcccccagtgaaggcctggccttaattgtgttgggttctggcttgctgtgagtttggtcagtggaagtcagtccactgaaggtgaccattgttcctatgccaagtgagcagcctggagactccctgagcggccccgctgagggcccttcacacccattcacacccattcacactcgttcacacccattcacacccgtttggagcggccagacaactctgtcagccctgtttcttctaacttggctgatcatgaatagcacacgccacattcttattcctccactcatttatttatttttattttattttaattttttaatgacaggttctcattctgttgcccaggctggatgcccaggcaggggtgcatcatagctcacagcagacttgaactcctgggcttaagcgatcttccagcctcagcctccagagtagctgggactataggcatgcaccaccacacccagctaattaacaaatttttttttgtagaggtgggatcttgctatgtgtcccaggctgatctcgaactcctgagctcaagtgatcctcctgccttggcctcccaaatgctgggattatgggcatgaaccactgctcctggcctcctctatttctttaaataaccatattgcctatcacactgagtgcctcaggggcagggccaatgttttgttcatctttgcaacccccagtgcccctggtcctgagcctaagagttgatatagtattattaacagctcatacagatatcagacactgaactaagtgtgctatataacttttaaaattctcaggacaactttattcccacttaattatgaggcaacggaggcttgcagaaggtaagccacttgcccagaaccatatggccatgagctgcgggtctaagacatagaagtagggctgtgccatccatggctggagcttcccacagctccaccaggctggcctgtgatagtgaatttttatctaaaattagaactgcttcttctgaccaagaaataaatctgcactccatgttcattatttggagtggattcagaatttacctccatcgtaggcaccacaggcaaatgtgacatccatgcaaatgatcatgttaatgtacagggttcaatggaaagcacttgagagcatctttgaaagagtaagaagggtcatactgtcatgtgcgtccatgtgaaaagaccaccaaacaagctttgtgtgagcaataaagctttttaattacctgggtgcaggtgggctgagtccaaaaagagagtcagcgaagagagataggggtggggccgttttataggatttgggtaggtagtggaaaattacagtcaaagggggttgttctctggcgggcaggggcgggggtcacaaggtgctcagtgggggagcttctgagccaggagaaggaatttcacaaggtaacgtcatcagttaaggcaggaaccagccatttttacttgttttgtgattcttcagttacttcaggccatctggatgtatatgtgcaggcttgggctcagaggcctgacaaaagggtttattgcggtcgtatggtttaagtcatacggtttattgtgacaactgttggcactgaaatataaagcaaaaacaaatttttaagacagtttaaagtcagaaaatgtacgctaagagcaggtggacaaggtagaaccccttcctgtgggtcttccccagacctggacccagagtgtaagctctggcaccctgtgctggctcatagccaaaggataggcacgtgccatggccatctctgagtggttctgggaggggtggaagtcttgttgagtcacgtccctctcattcacacccaaatcagctatgggattcccttagcaggtgacatgtgcctgactctgctctcttgcctgcctctcctaggcagacaatgacaccatcgactattccaacttcctcacagcagctgtctcaggtggcatcatcaagaggaggacagacctccgtattcacgtcagctgcagaatgcttcagaacacctgggtcgacaccatgtacattgctaatgacaccatccacgttgctaataacaccatccaggtcgaggaagtccagtatggcaattttgacgtgaacatttccttttatacttcctcatctttcttgtatcctgtgaccagccgcccttactacgtggacctgaaccaggacttgtacgttcaggctgaaatcctccattctgatgctgtactgaccttgtttgtggacacctgcgtggcatcaccatactccaatgacttcacgtctttgacttatgatctaatccggagtgggtaaggagtgtctttatgcgatggccttaaacctttacttgataactcaaacatgagtagccccaaaggcttgaagaatgcaaattttgatgaactgcagttcccagtacttccagcttaactggatccctttctacatgtagtgatgtcctgtagctttcacctttgaggtgcttttactctgtgttctgtatcacatccctgatttctcatcaggtaggatgaccatgtatcatctccagttaacatctggggagatgggtttctggagaatagaacagctcagcagtgttcactcagcaggttagctgtaaaccgtgatcagactctaggtgactgaactccagccatacggttaaaaagacctgcgtatagtgggaaaagcattgatttggagcagaccaaggttgaaatgccagctctgccacgtgccagttgcatgattctgggccagtgaaagcacctctatggaccagttgctcgcctgtcaagtggggataatgacacgcacattgtaaggctgttgggaggatgggatgagagagagtggatgtggcactgagcacagagagtgtgcagcaggtggtccaccaggaatgtgcactgaagatggcaggagccctgctgccctccttcagcctgggaatagaagctctgggagtccacgggttccagtcaagctcaggaggtgcagaggtcaggccagagatgtcaggctggggccagagggtgtgcaggctgggctgctctaccatagcccagcttccctggatgactgcatgtgggtgaagtggggtttgactcttctgcactcatgatgacaccatgatgtgcaactccagccccctctgaagtctctgttgatagatgtgtaccacacttcttggcttacaatatagacctggacacttcagtagccattgccttccaagagaatttataccaataggataaagagttctactaggaattagaggtgggcagattcaattcgacaccctcttgatatgctaaacgtagcacctctttccaggcacagtgtgaacatatgtcagttcagtaggtaggtgttgaggctcaccttgtttacagtctatgcagcttgctcaattcacagcagcccccttggtggctgagaggaggggagaaagcttaaccagattcccgttgtacaaatagtcataaggtgacttttgaatttgtgtgaattgattgacattaatgaaaatgagtgggtgaccttagttcttccttgccaaaggattctttctggtcaaatcctgccatttctatatgacaatgcaatttgctgggaagacggggatgtgtgtgcaggggtagatgtaccctggctatacctggagcacagggacttattggctacacctggccatcaacaagatcatccacctggaagtccattagaatgacctggggctccaaacacaccctgcccaggccctacccatacattctctgtttggcctggtggggcttgggcatgttacgtttaaaaaatcttgagtgattctgaggtggagtcatggctgtggcttcgctgtggcattctggtctgcgtggagccctgaatggcagggttttacggcaaatgcaatgactgcccaggggcttctaagtgaccctgacctttttcccaagtgtcccacctctgaacaagcctctggctatttttgcttcctcctttgccactaagggagctactgtgaaaaaaaaaacaaaaacaaaaaagaaaacttggtatttgagagaatctgggttgcctatggaggaaggaaggaggctctagaagacagaaggaggggagcagatcctggccaggttcccaggctgagccagactgccctggagaccacatccaccacccacgagaaatgcccatcctaggccagtgggccagttttcctggcttttctctttgccatgcccttcaaaatcccaccaatctataataactgggttagtgtgagctgcttcttccatcttaggaaaattcctgtaagcatatccttaggttattttccctctgacccctgctgagaggaggtgccccagggaatgaggagggggtttatatcggtataggggctcctggagggttcgcaggccagtgtggaacgtacagctgcatggggctcagggcaggctgaggagggtcaggaaagagaggccctgggagagggagggtcagggcactgtactcagagtgcagccgaatgagaccttgcctggccctgacaccaggtgagagaagggaaggtcatttacttttctgccctgtctctgggtcccgctcctgggctccaaactccagctacttccctgactcatctggtttacctgggtgcatggagcatgtggtcattgtgggattaggcctcaacccactgtgcagtatgggacctgcttgtctatcgggaaagctctcacaggctttgctgcctaaggatggcggtgaggtaccggagctgccaggatttctctgcaggcccctcagtgagtgtctgatccacacgttctgacagaaggaaggtgaggtgtgcaggaggcaggggcagtgaggacaggctgtggagttcctcacctggtacaactgagtcatgaaggaagaatcgggccttggtgagagctaaggggctactgttctcttccagatgcgtgagggatgacacctacggaccctactcctcgccatctcttcgcattgcccgcttccggttcagggccttccacttcctgaaccgcttcccctccgtgtacctgcgttgtaaaatggtggtgtgcagagcgtatgacccctcttcccgctgctaccgaggctgtgtgttgaggtcgaagagggatgtgggctcctaccaggaaaaggtggacgtcgtcctgggtcccatccagctgcagacccccccacgccgagaagaggagcctcggtaggtggtcgctctcagaccccactgtccaccggggcgcagacccctgactcggggacttgggatgttcctcttggtgtcatattccaactcagattgagccctacattgtgctgcacctggtcatacggagttgaatcagacctggttcccgcctcccccaaggctcatggtccttggaggacccgttgcagggcgaggtcaagagagttctgacctggatggcccatagacctgacgtcccagaatccatgcttctcatctgcaaaatgaaaatgtcaatacttacttcttagcactgttgagagggttacttacataaaggaattttggtgaaactgcctcagcctgttcctggtgcaagtcattgagtgcttggtaaatggtagtttttgttactcctgttgttgtcacccatgttaacaacaccaatgatgacagtattcctcacaacgataataactataacagcagacgtgttgacatcagggtctagacagggccatggggacgccagctgcatggatttgtcctgatcgctggcaggctctactgggcacaagctatgtcacttttcttctccagaacagggagtgcatctgctgctgtgctgctgtgttgctgtgcggctgtgctgctgtgttgctgtgcggctgtgatgctgcgctgctgtgctgctgtcatgctgtgctgctgtgatgctgtgcggctgtgctgctgtcatgctgtgatgctgtgcggctgtgcggctgtgcggctgtgcggctgtgctgctgtgttgctgtgcggctgtgctgctgtgttgtgggcatggacgagggaatgaatgtttgcagagtgatgcccaggatttctggcccagtctggggctaggtcaacagatgtggtggccatggtgttgggggtgggtggggcagcagtagttgtcacaagccctctccttggtcagggcgctgcccatggggcatctttgacagctctttcctcttgattcctattcaggccgtctttatgtccacctgagtccagactctttcctcacttgttcattcattcaatgcatgtttaatgaaggactgttatgcaccaggaggcagataaagtcttggaggaaaagatgcaattcagaataagtctcatgaatggtgcatgcaatggggtcggagtgaggagcaaaggacatcagggcagggcgaaggtgcctgtgggcacaggctcacttccctcctctccctcctgttccctgcagctgccgtagtagctcacgtcctgggggcctcttacctgggactcttgtaatcatttcccagctggtctaaaatgcccaactctctcccctcccattcatctggagcctcaggccagatttgttctcccaaagcccagttcccagttcctgctaagaaaaacttccctgactctccttggctgataaacgtgaaatctctctagtctgacagtcagctgcccattggggtctggcctcagtttcccattcagcacttccttctccaagttttttatcctttcccaccaaacagttctgattgcctttactatgcccagggggccatggcctttacttgtcttcctctcctcctctgccaggctctgtcctggtgccctgtctgttattgtggtctcctctccttcccagacgtgttggtggctgatgtggaggagacagccagcacccaggggaggtatcacagcactgccatctcttctggggtcttcctggctgtggttctggttgtggcagccttcaccctggggaggaaggcacacagcaccagtggccggcctctgagctcctagatatgaagcccagagaaggtgtttagatattggctctgccagcccaggcacccgagagaggatggaagaaacaagggtgcagagcttggcgcccagcagcacctgaactccatttagcttggcacaggtgtatggtggggtgggtggaggtggggtgaagaaagatggggtgggtagaggtggggtgaagaaaggtggagcgaggttttccccagatccgaaggctcagtgctgggtcaaaatgtcaaaggtaaacaggtgctaacgtctaaagcctcacctgcaactctaagccaaacattagtaacagcagagctttctctaggtggaatttctgagcctttttttttttttttttgagacagtgtcttgctttgttgcccaggcttgagtgcagtgacacaatctcaactcactgcaacctccgtctcctgggttcaagcgattcttctgcctcagcctccctagtagctaagattacagacaggctagaccatgcccagctaagttttgtatttttagtagagacggggtttcatcatgttggccaggctggtctcaaactcctgacttcaagtgatctgcctgcctaggcctcccaaagtgccgggattacaggtgtgagccactgtacccggcctcttttctgaccttttataagctcgcttcttaggcctgtagcataaatctcagcctttccttagggtagagccagctgaataaagaacctttttcagagtaagtgtcaatttggccactgttgccttcgtttctcctaagaactagatcctttcaaattaagcagacaggtggggtggttgtcatacagaatgagaaggggcaactcgtgtgtcttcccagtgtccttggagtgttggttcttcccaaagcaggatatgcaggatgcagcctggagaaagacaagaatgctaaatgcattgtaagtttcagtggctgtgattgaaaattaaagatgattgcctccatttctctagggatctgcctcttttggtttttgacacttcatctccagaactatgggctggggcggttcagggaaagaagcaaactccttagggcccttaggaagggagtcctgtttgcatgaggtctccagagagaaggagattgacaggtgacccaaggagctcagaagaaacaaagggatgagctgggttccaaggaagcagtacatttgcctagaaaatcagagagaaatcaggctcagggctcctaggtcaggcttggcaggaatgggagcttttgtgtactgccctggcaatgccagtgtttgccccatgaagccaatctcaggacccctgtcccaagaggggacagctaagacagcctaactctggatgtgtgagttgagctgcatgagaccccagcagggcaatggctacaggggaaaccccaggacaaggggacagagaattccagcagagacttggccatagctgccagctctgactagggctgcccaagagctgcccaccaccggcagctgtggtgagacgccatgagcctccgtgggattcagagtgcgtcctgagccctaccaggagtcagaggagctagggggccccagggactgtctcttgttggtttccattctccttgccatcacccccaacactcacccttaacctcccaggctggggcagttaaggaaagccttaagggttcccctgtgaccatgagtctgccctgaaaagcaatgtcaatgcagtggaatgcaggcaccagcccaggactggatctgagcagatgcagaagcagcaggaagctggagtggtgtgcgggtttgaggtacacatcaatcagagtaacaaagtggcaagtcagacatccgagaattcaaaaaagttcagaggctgggaacccaacatggaatcccaactccatccattcattcgttcgttcattcattcattcattcattcattcgttcattcactcattcatgaatgtctaagttgtaccctgtgcttgagaaggagcagtggaggctgtgggtccctgctgtgaggatgagggggaccctggggctgggggctcagcaggcttgccctgagtggtccccatgagcgccagccccaagccaggctctgtacttgaacctgtggatacaaagaggggtcatgcaggggtcaccattataaggggaaatttatttccacaggaaacatttccacctcctgaagtgtcccctctccttaaaaatagccccagtagccagtgcttcttcacagataaccaccacagtgttagccacttggcagcctctcaaggaaggaggtaatggcccctttatcagcagggcccagccaggagagtggctagtagggacagatgagtttggtagcaagaggcagtgaggtccaggtgaaaggtagagcagaagacagggccaccggtgacaggggctctggactaaagctgtcagagtgtgactgagggtccagtcacaggggacacagagaagtgggcttgcttgggagcagggacccatcctccccatccacaccacatctccacactcagggaggattgggctgacaccaagtggctgtgattcccagcaactgagactgtggtttgaggcaagggtgctcaactctactgcacgtgagaatggcccgggggcttttgaacctgctgctgccaggctgcacccaagccagttagatcagaatctaatcagagggtaggcctggacattggtgacccaccagactcaggttgttccaagattgagagctgctggtttaggactccttaaatccctctgagagagtccaggttgtgccctgtgcttaagaaggagcagtggagactatgggtccctgctgtgaggatgagggggaccctggtgcggggttctcagcaggcttgccctgagtgttcctgaaagatctactttccaagtcccaaaagaccgtatcaaaatcccactgacctaaagtgcctcatttctgctgattcatatttgccccagcctctgccatccataagaacatgccatggaggaaacactgattaagcatcttctgccagcctggcaccttggacataatcctctaatcctccatgtggccaggtattattctcacctggcagggatggaaactgaggctgagagaggcaagtcagcacagaactgcacaggattcaggtagcgagtggcagagttggggtctgagtcggggtcactgacttctggtcctaggttccctcctccctgttccatcatccccaaggcaccaggagcccaggagcccaggaggcctggcctcacattgagtttgcacagagaactgcatcagacacactcctgtctgcagctcctatgtaagatgtggtaccaggtgcaaaaggagggcttaaaggagggttgtgatgtctacaccacacccacaccccagctggccccacgggactactcacttgacctgtggtggctcctccaagttctccgcacctccagtacctgctcatagcccggtgatcctgctccaggctccaccttcagcagagtgactgacaaccaggggccaagagaacacaaggccgggccacatggcacctgttttgagctgtctcctgtgaccttgtagggacagaggctgccctccagccccttcgaaccacagcatctcaccatcctcctgttatcccacctgccagtgccagagggcgctgcagaacaaccttggagctattttattcctgaagaacttgttactgtgtttactgtgagtgcccgtggttgtccattacaggaaggggttccacagttttcagctctaataaaggactcctgtgaaagcctgtcctggctcctttccattactttaaggggacagaatccgatctactgtctgacaacagagtggatggtagctcccctttctgcctggtccctaccacaggctgaaggtggcattcagcagccccttgagatcttgtcccctccagccctgttcctggcatccaaatccctgcagtggctagtaaggggttctgccctgggcaggggctctatcctctgcaggtttgatggcacctgaatggcttctggtgtgtgggaatcagggacagccccagccaatggtcgtttcctgtaggggatgaaactttgacctcagcatctcttcccattgcctgtgttggctggagtacttagtgtcccgagtgcttggcaaggccactcaggtgtgcactgactggagggagaaggtcctctcgggaaacctgtgtctgtgaaatgctgcattttcagaaatcatacaagctggatgttatgtggccattattaaaaattaaattgtagagtcttacaattaaataaatattatattaaaaataaaaatattaaataccaaaactcagcactttctggttatttgactccattttactattacctgtgcccaaggatatttacatcacgttgtgtctgtctgctggaaatactgtcccccgcggagtgactgcccagctctcccagctccacatgcaatggcgtcttattgctggcataaaatggccatggggggaggattcacaccatggaaatcacgctacaaaggaagcttccaccttcccagagcctgttgttaaagatttcacaatgccccactgcctacagctcacccagaaaggggcaaatacactaggagagcttggaaaaaggcttcattggcctgccaccatgttcaagtttccttcattggcattaaatttttttggaaagcgtctgtgttttagcaagtgtggaatccaaagctacctcggcagggagatgccttgggaagctcccacaggctctgatgaaagcagtggttgtggcacctggcctactcttggcccctggggaagggaaagctgtccaggtacaggttaggggcaggccaaagacgggaagccaggtggtggaggctatgggatggcacacgtcagagtcctgcctcatctccctctgcctgagtccagcaccaaattccctctcctgctcctcttagccatgaggacgtctgatatccctcagctccatctttggatatctggcctgagccaaccttcaggtgacagttctgttttccctggaactctatacctataagtgcctgggagcccatatggtttgtccaagcttcgaaatgaggaacagcatccctgctgaatcagagacaaagatttgtttctgtaacagcatcttccaagaggcttaagctccaagattaagtgatggagtcatgtgggggcactgatgactccaagggcttggcctgggacaactgctcaggacaaaggagaagccaaggcagagtgaggccaccatgctgggtaatgactcatctgattgagatctaagatttgtacagagctagcagggaacatagaggagtgaacgctttcaaaatctgctccatcctcattcacagcctgctggggagctctctatggtcaaggaggcttggaatgggtgcacagccacccaggctttcctgtgttctgatgagttagaatctctcctcaaccaacccacctccaccccatgcaccactgcagatttctacatatgggactacaggtggcaaagatggggagtctgcttcttgatacctgtcttctcccaagtatgtaaatactggagggttgagtgttggcctggggtgcctaggcatagtgccaagctcagacttttgtattggaggggtgggtgggggtggaaaattatgaagaaactcacagggaacacaggatcagtaacttctcaggatagagacccacagtgactgtcccagcttgtcaccttctcccagagggatgccttctgtgtgctgtgaggagagcagaagagttggggagggggtatcaggaagctactggaactcttaaatctttgtggaagcctcactggttaagtttggtcaggatgtggttggctcccattgtgtcaggatggctgcctagttaataaaattgctgtctcttcttcctttctctgatcaccggattttcctttaaattacatgcagaattttggtaggggaaacaattcagtactattttcctgggactttggttaataaaatctctgtctcttctcccttcctctgatcactggattttcctttaaattacacccagaactttggtaggggaaccaattcagtactattttcctgggacttttccagttttagcactgaaaatctcaagttctggaacccttcgatcccagacaagccagaatggctggtcactctagagcctctggacaaggctacagggaagaggaggtccagatgctataacaatcatcaaacacagaagactggaaaccctttagcaatgaaatttagactttcacttttttagtctcttttcaattcagtttgaataattccttttagcatttcttgtagggaaggtctagtggttatgaactgatgaactcccttggttatggttagtctgggaaagtctttatatttccttcgtttacaaaggacagttttcctgtctaaagtattcttggttgactgactttttgtcttttagtattttgaatatatcattatcccagtctctcctggcctgcaaagtttccgctgagaagttaactcatagacttaaggggagctcctttgtatatgataagttgcttttcttgtcgctctcaaaattctctcttcgactactgaaaatttaattatattgtgtctcattgtaaaccttttaggattcaacctattgggaacctttgatcttcatgaatctggatgtccatttctctgcctagatatcagaaattttcaattatgattttcttaaatatgtttttctcccttttctgtctcttttctgcatctggaattctcagaatatgtacattggtttacttgatggtatcacgtaaatcccagtcttttccccctatttttcatctttcttctttttgtttatctaaccagatgatttcaaataacctgtttgagttcactgattctttcttctgctaatcaagcttactattgaagatctcttgagtttttcagctcagtcattgtattcttcagctgtaggatttctgcttgtttcttttttatggtttctattttttaaatgaacttataatttttttcattgttgtttcatagatttcatgtagtactaaatctgttcttttcagtgaacttcaagacaattatttgaattatttgtcaagtagttaatggatttccacttctttagagctggttactggagccttattagtttcctttgatggaatcatgtttgcctgattcttcatggtccttgtaatcttgcaatggtgtctgtgcatcagaaggagcagtcgcctcttctgatctttaaagactggatttggtaggaaaagatctactgggtctcaagacagatatgccgcctctgggactgcagtcaagctgggatggcccttggtcatggggcttctttcatgtcttcagttgggtccatggttggcagtcctgttatcctgggtgtgggtgagtatagtttctgtggggtccccagagaaaagagactgcctttaacactacagaaaccagggctagagttgactatgcaggctggttttcagtctggggctgagtctatggtagctgacctgttcctgggacacaggcataccttctagaagcagatttctatgctcttatgtttcagtggtgtgtcacaacctcctacctgggtcctgaagcttccataaaggtatatgtgtctgtggatggttgccaaattgttgttttgtggagaagtgagagctggggattcctattctgccatcttgctcacatcacccttccctctgccttggacattttttctttaaccaaataaattcatcagttggcatatagccttgaactgtataagcctggataattgtaataaaagtttcttgggcctacatttgtgggtgtacacaatcaccttcgatataaggagcaaggtgaaagtaggttgatgttgatccttccttctttccttcctttcttcctttcttttcttttcttttcttttcttttcttttcttttcttttctttctttctttcttttttctttcttttttctattggagacatagttactaaggtcataatgtttatcgtttggtagctatgaaccagttactcattaggatgtaaatataactggctaacatttaacccccaccttacaagcaataaatactaccgtgacaggaatgctttctaactccttaaaagtcatggtatttctctttgaaagcatttcatgtttaaatagaaaaaactcccctataagcaggaaagaatattttatgctctccatgtcaaaaatggctgaaacaacctctgatatgtgagatgaattggatggtcaaaagcagtgaatgaaaaggatttccagataatggctgacttgaaagctaaaaactatacaactccttaataagagcagttaccgaatgacaagtgataggccaatttggaatggagtgaaattcagtgatgcatttggtatttttgtagactttaagtcctaagtgcttcatctctctgatggctattaccacagaattaaaaaaaaaaaaagagagagaggttaaacaaaagcatcaattaatctatataggaatttggatattttcattgaaaatgaagtcttttgaaatttctgggtctgtttaatttaaagcattctgagtctgtaccaaagatgagcaataattgctcacaagggtactggggttctctgttgcattgtgaatatggaattgtagtggtagttagcaacatatagtccactggttctagctatgtcctcgttttccatggtttaatttttgcaagccctgtcaatatattttaagattaggaaagtcattaagaatcattttgtgtaagctgtcaggataggtgttttccaagcatagtatttttcatatttctatctgattatttttgatatttatttggttgtattctagaacagctttgacaggattttggagattggggtgaagcactgaaccaaagtcacagatatgcacatatccctctaagaaggtgaagttaacatttgtcagagggacctggaagatttctttgtaaccacctgtccaaggagtttggtatctctaaaagtgaacaggcagagcatgtctggttagttttggaaggggcgtgactaacaggtgatggagtgttgttcttactgttgaaagattttcttaaggggcaagtgttttattttctggtattcatgggacattgtaggggttaggatattttcagcttcatatgaaagaaacccactcaagttggcttaaacagcaaggacaaatacagtagttcccccttatccacaaagtatacatttcaagaccctaatgaatatctgaaattgcagatagtgttttttcctattcatacatacctatgacaaactttatttcataaattagatggtaagaaattaacaatgataataaaatagaacaattataaaaatatgctataataaaagttatgtaaatgtggtctgcctttgtttctcaaaacatcttattgtactgtagatcttagcaacttcacatacacatcttttttccttattaagccgagaagattcacattttcacttaaagaaaccacttcatgacttccctatggcatatccggattgccgtgattccatgtcctgcaccttaaggccaattttaaataaaataaaggttatttggatgcaagcactgctatccaacacactcaatctggtaacccagatggctcctaagtgaataatgggcaggtgggaagtggcaactcaggccagttctcagacctgagtatgaggtcagttgccccctgggcacattgggcgcatggggtgagaatagatacatggacaaaattggggttctataaaaaaggagggaaactatgctggagaagaaacttatgaaatgcccaccagatccttaaactcttcctggtaaaataaaagcaagggtgctagggaggtgaatgatgacagacgctggggcagtggcgagaccagtgcgacagttctgaatctgtgggggacagacagtcagagggggtctttgaacaagatgtggagaattactaaactctcctggagaagcagagagaaaaactgcagtgcagaaggccatgaggaaggaacatacaaaggggagaaatgccggtctgcctaggaccatttggaaactaggaattacctgaaggaacaaagatccaagggacataactcctcaaaagctggtgtgaacccagatctttcctgcaagaggacactgcttggggtacctaagacattgatttctggggtcccccagaaaacaagttagatagtaagagattaactgcttcttcttcccacgcagccgcagccatgctgggatgctgctggcggggagcacagctgccctgacacattggagcccatggtagcatcctcagcatggacaacaagaggaaggacgtatcctctccatgggctcccgcatttgttccatgtgggtattcacatccaatggtgaggagctttgtcctcccccagcccagggcctgaagaaagatgaatgaggggtaatgggacagggtatctggagtaagaggaggaaggagaattgtgaggaagcattgcagtttactttggtaatacctgggagcttaacactaaaacggccttagcactgaattctgagcagagaggaaacttaccaacttcgcttctgcctcccttcctcagttgggatgctatgagtggctagatggctcctagcccagaagtgtcggcctgttctacttgagttggaaagctccttcacactgtgaacccatcagggcctgtgcaaataattacgggaaggaaaggacaagtgtggcctctatgattcataagaagaagaagagcaatgcaagagaaaactgttctgaaggcatggactggcatttccaaaagggcctcagctggagcagagacactgaaaagatgccagtcccactggaattcaggaaaacacacatttaataaagttaggtattgtttctagcatatttgatcagcaagacacattaaaagatttggtaaatagttcagaaaagtggatactcctgttgtcttggttgttgtataaattggcaacagtccttggtaggcactgcagctcacattcctattcatggtagaggaacagtccatcttaagtccataccacgttttatttacttactcatcagctgatggacgcttgggttgcttccacatgctggctattatgagcaatgctgctatggaaattcatgtaccaatttttgtgtgggcttatgttttcatttctctgaagtatatatctgatggaatttatgggccataagggaactctctgtgtaaccttaaggaaaactgccaacctgtttccacagaggcttgtgctgtgttattttaatcacaaccctgccctgggactgagccgtgtaggtcctagcatgacccatggataataaatacagacacaggtactcatgccatccacctggacattcgcacacaggtggacctgcccctgcagtggccccaccatgacccactcacacctcgagcagctcaagggcctgattctgtgcctttgtcctccacagatacagagagggcggtgggagccacaggcagtcaggaggttgggacctcgccctagtgccacccctgatgccctgtgactttgggtaagtctcctgctctttgtgggtcttggttccttgcttgtccaaggactcctggcctgcctcacctctcaggtgttatgagactttttcaatgtaacacaggtgaaagtgctatgagctaaacctaaggcaggtgggctgcccaatcaggaggtcatgatggtctgtggtcaacttgtgattcttcctctgagaccacccagagaggaaaagaggagaacctgatcattatatctcattctaggtgacagaggactctgaaccagactgagaaggaacagtgttcattagcagctagccacacctcacgcctccctctctagaccacccagtgctgcaggtgatcctgcagcacactcagatcctgcagcttggacagccttggctccaggtgagagggaggagatcagatttcaggagcggctctatatagctccaagccaccagagctgtgctcactcctgaggctggtgccaggctctgctcaggatgaggctgtccagagccttcgcttgggcactgctgtgcagtacaggtaatgtgtggcccccgagccctctgtcctgggcttctctttgctttcctgttccactctgaggttgttgtagtttgctttttgcataggaagaagctcatggctgattggctgtgagatactctcctccatacaaaatgtgtcactttccccttagtactggaggaggaagggacagacagggattgttctggtcactaggctgatgtcagcatgatttttaatgtttctcagctcttggatctatgggcctcttccttgccttaagcaacttatgctgagattctacggggggcaagccagaagtggctgagagaatgagacatggtcttgctttggaggcgttccaggtggtgtgagcatctgccaatgctcccctggctcatgcaagcctggctctgcacatgttgggcagaggctgcacctgtgactgcagaaataagattgagccacggttttcctgcatcagccttgggtgagggagaaggagtatgacccagtaacccttccagaaacatacatggattctgttccagcatttctgtacacctacttctttggggtcagtaggtcagatgtgaaaactattctatcgttcctgtccttttgatattggagcatgtgtctgttagactctatcttcttcctctttgttgatcttattataagccctatggcatttcccaatgtatttatgcgaaatgagtagcatatgaactttataatatcaaggatgtataatacccaatgtctatataagatatataatcctggaaaaaatatataaaataaagaaactcataactcatggaatgtgatgacagttggtgccctatgaatcactctctgtactgaaacacacagcacacattccccatccctaaaaggcttgtattcaattgaggactgaaaccagctcacacagagtcaaatagcagcacaagaagcaatggcccccgacacccccaccaggcagccgtggcagctgcagacactgtgaggtctggggttcacccagctgtgctgttcacaccaggcttcccagtgaggtggagctcaggtctggcctccagcatggggaggtctggaaaggccggaataggacgtgctgagcaggtgccgtgagcagaggtggagtcacccgaatggggtgaatttaggaacaaagagaacacagagaaaggtgctccctccttagtctgagtgtttcaggaagggcaaagctcaccctggggcctgggttaggcacatttgagcatgttcaactgcatttcaggcacattgctgaagtggccgcttcttgcttcactatgcgtgaggtctctctggggacagaagagggcttggctcctggtctttgttctagataggtctgggctttttccaagacacttggtgggccttggggaggcccacagtcctccatgaatgtgatttggggagaggaagacacagggtcagggaccttccagaactgaccttgcagagtttccctccactcatgaagctggaaggagcgtttggatcctgtaaacctcacatgaagcgagcatctctgtcgtgtcgtctaagttgttctgaatgtttgtcctggagcttgaaggattgcctgaaattcactgacacgtttggagaggaaaaacaaatcctacttttatttgccctttctgatttttctaaattaacagatacagaggtgctgcaggcaggccttgtcctctagctctggcatgcagcgcacggtcccctgggatttagtgagagcagatccaggtctttgatggtcccagagcaccctggagtggaataatatgatggaaccagctgagtcctagcttctgcttagcacgctgatgtctttggctggaaagggtctagggaaaccctggccaaaaaggagccaaagaaataaaaataacaaggcgcctatgtccattctcctgctgactgacatgcggctccaggtcagacctttcacctctgtcaaccacgattttctcatttatgaattggagatagaaacaggtaacaaagaaataataatggtgaagaccattaaacacttattcaacactcaacattctgtaggtactacatcaataatttcatacaggttgtctaatttcaccatgattggaactttttgaatagtaataattttcccaaaatttttagggtttgagaaagtaaataagttgcaaacagcttccctagaggcacatgctgtcatgctagctaggactgtgatgagggccattctgatgcagaggctgggctcctgccgccatgtctgtcacgagtgtgaaccacagagccacgtctcctgagggaggccctgcgactgcacccagagctcctgcatccaagtccgtgacacgtccctgaaatggtgagccttccataaataaacgtgtcatttcccttcacttaacaatgttattcaagttgattattgattttattatgaaatttacaataagaaatgtttagaaaaggtttagtgtgaaaaactctccagttttgcccaggatgaaaggtttcatggacaagtgatcttccacgctaaagcaacaaaaatcatcaaaactaggacaagacagtccccttgatcagagcagtttttcagactgtggtgtcagaatgtggactttgagtcgaaccgagcaaggagaaagcagcagtgagtgagctgggccgtgagtgctgagagccattccttctttccttgggatgcagggctgctccagggatggggacagcgatatcccctcctctccctgcccagctctgtccctttgcactcaagctcctcttcatagtgtggtcattttccattcttctcccttgacccattggtaacttcggcttttcattttgcttttctgttttcatgattattcaggaataatccatttaccaacaatgacaagaagtaaacatgagcaatatatattcaccctttccctctcctcacacaaggactatgtatttctgagttggacaccatatgtctcgacaggaagtgtaggacctgagcctttttctgggccaaaagaatgtggtacatgtatctgaatatcagcttcagcactgatacaacttcagctcaatcctgaaacttctctctccacacatggtcttcctctgtgtgtccctcaactccttccagccccatggagcccctctcttttcctgccttctctgtagcctcactgtgcagagaaaggaggcacctctccacagagctgtgtcccaggagaatgggagcctcttctaaacacctggagtcctagagagctgaggggctgctccatcctcggagtcagagatgaaagccttgaaggaacagggaagaactgcagcgtggagagggtgggtcggagggagtagaggtttcctcctgctgcaggcagcctgttgatggatggattcatttacttagtgcttagccagttgctgggtacctgctgggcactttacacacccgaacacatttgcccccttatgcgaggtgctactttcatcctcactgaacagtgttctggaaccgcaccctcaggtcttacagtgacatggattctcatgtatgggggtggttaggcctctctgggggcaggaacactgcctatttgctattttttctggcctccttaggaaaagacaatcagagtggtagaaaggaggtgttcgtgctgactttctgttttccactgtggcggtggggtagatgataaagaagatttggtgaggggtgctaaatttcttctatttcccagtgatctaaaagaaattatactacaaatgggtgtgataactcaaaatctctgagtgtatgaaacagaagccacattagttttgggggaatggctatctggtcaccaatttccttttttgtttttgttttgttttgtttgttgttgtttgtttgtttgagaccaagtctggctctgtcacccaggctggagggcagtggtgctatcttggctcactacaacctccacctcctggattcaagtgattcttgtgcctcagcctcctgagtagctgggattacaggcgtgcacaaccacacccagctaatttttgtactttttagtagagatggggtttcgccatgttggctacgctggtctcaaacttctgatctcaagtgatctgcctgcctcggcctctcaaagttctgggattgcaagcgtgagccaccgcacctggcctgatcaccaatttttctgagaacacctggaagttgagagtatcaacaaccatttgccccagagatagcaaagtccctcagctcaggagatgccctggagccacggtggttcctgattctctggttgtaggacccgctcagtgtaggagtgtccttagtgtaggggtgtcctcagtgtaggggtgtcctcagtgtgggggtgtcctcggtgtgggggtgtcctcggtgtgggggtgtcctcggtgtgggggtgtcctcggtgtgtggggtgtcctcggtgtggggggtgtcctcagtgtgggggttgtcctcacgcattctctgggaaggttttcaactcaggaacaaaacagaatctgtctgggccatccaggtgaaactaaaaggaaatctatctgttatttcctttcctcaagtgagtgctcaggatgtgatttcctttgttgatggtatagtttgctgggatgaaatccacatggcgtcttgccagtttacccccacccaacccagaggcctctaaatagaattggaggcttccactcctgctgcaaatgcatttagtgcctccctgtcttccaggtcaggtgctctctccttagcctgcattgcaaaatacttcccaatgtggctcctggacctctcctcccctccacccactcctgccctcggccccctccacactggggttcctggcaccacctgtgaagcagctccatgccattgctcacactgggctctgatgagaacgcctacttctacccctgtcagactcatctgccctatccttagggtcctctacgaggatttcatgattcagctggaggcccagctcttctgtagtgtctgcgtgactccttcccagacgggcagagctctttcttttgcaccctactagataccttcagaaaaggccgagttgtcttttcaatgtacaccgacacttgtttcattctttgacgccactgcaatgaaagctctcttttggggttcaaggcaaaattgttaatgaatgaatacatgaatgaatgattgaatgaatgaaagcagtgataagatcccagaaggcagaaaaccctgtagcatttatacccaagacagtctgttttgattgagcatggcagccacatttccatcaattccagacaaagccaaacacaacccaggatgtggatgagaaagatgatggaatatatgtgactaaggtccccctttccctccacactggcttttgggctgggacctcaaggttatgcaggtgctctgtgtgacaaaggacatcttttggatggctgcctcagatacagaacttagaccatttgcccaacacgggctccagtgattctgaaaaaggacttgcagcacaggagaccaagatggagaaacaaggagagaaggaggttggagttgggaattccctgtgccaccatttttccgggctcagaaggattggcagctctgaacattttcctgtattgtccttttgcccttttcaaagattggttttagatctcactgtccttggcatcaaggaagcactcaggctgggccaaaagcaaaactagtatgaagtcaaccctgtgtgtgtcctaatgggatatgtcttaactgtcttctcatacttcaaataagctgtaaacactctcccatgtacataaagcttgctgggggctaattgaggatgagaggtcaggtttgaagactgaagggggtaagaggagtggggagacccctcaggagggcgacattccatgtccacaatatctcactgtaggtaagaaatggaggcccctccctgccttgagtcagggaagccaagcttgggctggggacccttgttgcccctctatttgccaagggcaggaatcacagagtggcatccacacactcatgtctggagcatctcatcctgacacagaggctgtggctgaaaacacatgtccctgagatgcagattttgtagcttgtggggcctgaaacacagctggtggctggaattaaaattcctgagtggtattcccatccacaggcagggcttccaagggcactcggaagacgcctgcagtcctggtgaagaaaacatttattttattcaggggttatggaaagagactaatctgtgtgcagaagagctgttagactttccattccttgctcgccccgggccttgcacttctgagaagtaagctaatgagagctggtgccactcgctggggaggaagctgcctgctggagttaggctgattccaaatgctgacacctgtcagttctctgccccacagcctcacctatgggagtgaacaggtagaagtcttggatggatctctggggtccagatccctgagcaaaatgtgtaaagatatgtccctgacctaccaatcctcttccaatattatgaccatcacatataacagaactttcagccaaccatccacattctttgtgggatgcatattaccatagtgactcagaaggtaggtggggaaggggaaaacctgctgattctccccttctctgtggaagccagctgagtggcatgctgcatatagagatgtttctgtgactgccagaaaaaaaggtgagaccgctttccagtggccaagtattgagtacaggtagtacaaaaaatgcattgggacatacgattatagcctggagcaactcatgttgacacacgagtagaataatgcccagtctgtatccccagaggcttgtattcagttgagtactgaaaccagctcacacagagtcaagtggcagcacaagaagcaatggcccccgacacgtccaccaggcaatgggtggaagctgcagacactgtgaggtctgaggtcggccccacatgcgctgatcacaccaggcttcccagtgaggtggagctcaggcctggcctccggcatggggaggtctgggaagactgcaaaggacgtgctgggcaggttccatgaccaggagtggagtcacctgagtggggcgaactgaaggacaaggagagagaggcacttcctcatgggccctgtaggcattgctggtgcagagatgtgtgcactggggtggtttggggcaggacggctgggtggagcatttgagaggctcagacatgaggctggacctcttaggggtctccttcctggaacatccccccagctctgtcaactcctctccagcatggggggcccctctgccctcccatctgggaagcctcactgggcagggaaaggagctgcctctccacagagcctgtgtcccatgggggacaggagcctcctctaatcacccagagtctggagagcggacgggctgctccaacttcagagtcaaaagtgagagctgtgaaggaaaagggaagaatcgcagcatggaggatgcgggctgggggcaggagcagtttccttgtgatgcaggcagcttattcatttattttttaccaaggacagaggacttgccaggtacagaacaaaccttttaaaataggaacatattggatcctagaacacctcttccatgccacttcttttttaactcctcaggtgactgcgtctctctctccttttgcctcatcagtcaccccatgaaaatctatagtggattttagcataaaatgttacttgcatttttatttttgtctgccactatggaaactctaactttgggttcaagccatatttcctaaatgaatgaatgtgtgactagtgtgataagatcacggaaggcattagcaacatagcagtaagttactgccctgctatcccagggccatcatcatggattttaacgtgggagtcacatttccatcaactccagacaaagccaagggcaggccacagtaatggatgagagacgtgatgaaatctgagtgactaagggctcctcccgctccagaggtggagtggtgtcaggacccccactaagtttctcggggctttctaggatgaaggacacctgggaaatggctcttacacgagcagtgctacaaccctctacaaaactttgttttcataaggcagcaaataatggtatgttcatgaaggtcatgattcagggaacagagaggagtttgaggggaggacagggctgaatgagccaggcatttcttgtgtcgctatttctccaggggtcagaagagtgagatgtttggaacattttcctaaggaccctttcctttttcaaaggtattttggttctgactgtccctgtcaccaagaggctcaaggttcagccagtaggaaaactcgtacagaaggtccccatatttctgctgttctgagatgtgcccctcttatcttcttatcctacagagcctctgggctcccgcctgggagcaggagatacactgggggctaagtgaacacgaggggtggtggatcaggctgaagtgttggccttgaaaagtgcctggtctggccagggctgcaggccttcttcctggaggacacgctctgctcagaacagggctgctcctgtggagctgccctaacaacaacttgctctcccataactgtggccatgggtgaggggttggtgttatctgctcaggtgggcttctaagtcactggtcctctattttgttttgtagttttcttcaagaaagtgctgaaagggctccagtgcatggggccttctcacacatttgggcacatttccttaatttatgagtactcctttatttttaagccaatttagtaccttctggccacaacacataacaaaacagatgtatgcacacataaatacatctgagcacacatacacactcatacaaagatcctatagctttaactttggaactctagccaagagatatctacacaaactcaccagcttatcaaaaaatggttggatgtaagcagttgtttttatcttaataccagtagaatggtcctctaaactagaaaaaatacattttcttaagcaaaaaccatatccttatgtttttgtttcaccaaacacacatcttattctcctacttctctaactcctagtaactctaattcctagtgaaaattctaggattacttaatttaacataacatgactttaagatttcaaatcaatagagaaaattaaatttaccaaattaaacttaccaaagatgaccaaagtcatgtgaactgaaaagcctctgaactagtttctgttagtccaataaacacttagacttttctttaagacaattaattagagttctttagactttaagacaattaattagcgctgtttcatataacttggtcgtgaaatatcacttcacatgacacatacagttctatagacggacacagacagaggcagatcttaaacactttagatttttcatttgtgtgttttcaaaatttttctgtcccctacttcagattattggtctcctgatgatctgttccaagtccaaaataattgttaacgaagcaactctaaatgtacaactccaaagacatgactttggtgaaatagggtagaaaatgtacatctcaaaggcacagacttagacctaaacaaagtcaaggtctgttatgtaaactttaagccattgtcttccccctagttaaggttcctggtggtacagatgcagagacagagatgctcttacaaaacggagatttcctttaatgatgtaaattttctttacaaaatgtttttattaaagtgacttaatttgataggtgtttttatttgtttgtttgtttgtttttgagacagagtctcgccctgttgcccaggctagagtgcagtggcgcaatctcggctctctgcaacctccgcctcctgggttcacgccattctcctgcctcagcctcctgagtagctgggagtacagaggcccgccaccacgcccagctaatgataggtggtcttttaacttagcttgattagatcaccggctttagggtaaagctctttggggaatggggccaagaattcatgcattttttaaggactaaaccacaatgttcttattcaaatgtgtgaagaaaagagtatctccctgtagtaatgaccatttcctgccaactgtcctcagccacccctaaaattgtagctatcttctgccattacacacactaaagtcagatcctctcacagtacaaggtaatctctggtacccccaaaagccaaagaaaccaggtaacgcaatacaagacagaagagctttagacctgagaacaatctgcccatgactgttgaaactccacaaagaaagaacacccctaaaaggagtgagcggtgcctttatcctgagctctttaagggacccaaattattagaagcctttctagatatgtttttcacttggtactgaagatggcaacagggtggaagtaagtgaaacaacaatttttaagaaaggaagtgaactgagaagccaagcacctttttgtttttctttttgcagctgtgggggattttagccaattcagaggcctccataatttggaattcttatccggatttgaccaagtccagtacagttggtcaaatccaatgggagaaagactgaaaaaaaaacagcgaaaagccaaacaatatgcttattcttcttattcatatagttgtattttttggatgactgaggatggctatttggagattttggtgaggtagtaaactgaaggagccaatatgtgcatgttcctcagggcctctgagaagttgacatagtcagcatttagtcaaagggaccttgaaggtttctgtgtcaccacttgccccactgaacgctctaatggtaaggagaaattaagaccagctggttatcagtcttaacttttagtcattaaggagacttttcaacacaatatcccaattcagctacttacctaggaatggggcccaggccgaagattgctctctaccatcttagaagcaggaaagaaactcaaactcaccttcccttttgcaagtaagcagagattccaggaaggacttgctctcctgtttccaatgtcatggaaagcaggaaaacttgccttccctgttagaagtgagtaaaactccagaaaagcagtcgtatggtgaaatacaccttagatctcacccaagtttgggggagatcagggattctctggagtggggaagctcccaggcctcagcaaattgtcccattggtttgagcaataaagatagcccaagccagtaccaagcacccacaggagattcatcaaaggtcaggggcacctccactcagagtctcttcagttggtcgccaatttgtaaaccaaaaggtatctgagacaggtctcaattgatttaaaagtttattttgccaaggttaaggacatgactagaaattgaaaaaacaaacacacacatgcacacacacacacacacacacagaaaaagcttgtggtcccaagaagattttgtgggcttcaatacttaaaggggaaaagatggctggaagggaaagagggagggtatggtcatccacatgtctacgctgtgccgcttgggctggaaggcataggattaagcaacttctcttgcatctctgttcctacatttcattgtgttaatttttttccttcccaatcaataatcctggctggaaggcataggattaagcaacttctcttgcatttctgttcctacatttcattgtgttaatttttttccttcccaatcaataatcttaattcaattactttaaaaatgtttctaagtcttaagaaaaggagcaggtaggggatagtcaatcatgagtttgtctcacactcagtaaataggcatttatataagataaggtgaacatagagtaactacctgtggagatatttaaccttttatctgtagctctctgcttaggaacaaaaggaaaggcagcttcttgcatgcctcagctttcagcttagtttcctttttccttttggcataggaaattggagtttggagtttttatttttctttcacagaagatagataacaaataagcataggaaaagatactgccaaatgaagatggaatttttgttgtagttaccagcgtaagggcttggagtttagccatagcctggctttccatgatttgattttcagaagccctgtcaatagattatggttactttactcaataactaccattttatgtaaatcttcaggatgagtgtttcccaagcataatgttttgcatatgtccctctgcttattcttgtaatttagatggctgtattttctgatggctgtggctggcttctggagactttggtgaggcagtaaatagaaggacccacatgcacatgtgcctcagggcctctgagaagttgacatagtcagcattttgtcaaagggacgttggaggtttctgtggcgccacctgcccaagctgtttggaatctcccaaatgaggtgccatggcaggtctgctcagcctgggggattttagcaggtgatggatggttctcattcttctaagactctctaaagagcaagcactttaatttctggtattcaaggggccttgaagagcttaggatattttcagctacatgaacaaaaacctcatctcaaattgacttaaacaatgaggacagggattgatgcctgtgtctggacaatgcagaggctttagggctgacatcagcagcagctctggtgtggccttcccaccattgccttgctctgcagctctgccagttggcttcatcctcatcctggtagcaagggggagcagccatgtctgcctccctctgagtcacaccttcctttgatgccattggaccaatctgggtcacatactcaagtccgcatccatcactgatgcagagggtgagccttctgtcaccatccatgccaccttcctactctactcaggccagcatttggagctaggcttggagccagttgctcctaggacacattgggtatgctgggtgagaatagatacctggaaaaagttggggttttttgtttccaactgggaaatcatgctagggagacaacacaaaaaatgcccatcagaccctaaaattcttcctggtaaagtaaaagtaagggtggtggggaggcagataatggcagacctggaacagaggagaccagttggacagttctgacactgtggatggcatcagtcacaggggtctttgaacaaggtgcagagaattactaacctctcctggagaagcagaggacaggtctgagtgcagcaggctatgagagaagaacatacaaagggaaataaacaaatccacttagggctagataggagcaagggacgacctgggaggataaagatctgagggacgcaaatcctcagaagctggtgctaacccaaatctttcctccaagctgacatcgtgagttggggcacctaagactttggtttccagggtcctccagaaaagatactaggtctttgttccttcagacagccacagccatgcggggacgatgctggaagacatgtagccatcctgacacattggagcccatggcaggatccttgggctggggtacaagaggaaggaagcatcctctccatgggctccagcatttgctccatctgggcattcacatccaattgtggggagctttgacctcttcccagcccagggccaggggtagggtgaatgaggggtaatgggacagggtatctggagtaagaggaggaaggagaattgtgaggaagtattgcagtttactttggtaatacatggggacttaacactaaaacagcctttttcagtgacttctgagtagggagaaacaactgggctcccagcccagcagtgtcggtctgttctacttgagttggaaagccccttcacactgtgaacccatcatggcctgtgcaaacaaagttgtgggaaataaaggccgagggtggcttctttgatccataagaagacgagtgatgcaatacaagattgccctgaagatatgaacaggcatttctgaaagagctgtagtgggagtggaggcattgaaagggtgccagccccactggactttggggaaatgcattttataacattaggtattatttccatcatatttgattacaagacatattaaaagatgtgacaaaatcaggagttggttagagtttaggaaaatgggtcctcatgaagtcctggttgttgtataaattggtcacagtctttggttgacaaattggcttgcattccttcatatggctgaataaattcccattatggctataccaagttttcttcatctgtttctcagttgatattagatagtttccctctttggctaatataagcaatgttactatgaacattcatgtacaaatttatatctagacatatgctgttaattctctttagcatacagctagtggaattgctagaccataaaggaactctctgtgtaaccttctaagaaatttccagcctgttctccacagaagcctcttttaaccatgaccctgccctgggactgagccatgtggatcctggcatgacacatgggtaatacaggcagacacaggtactcatgccatctacctggacattcctacatgggtgggcctatccctgcagtggccccactgtgacccactcacacattgatctgctcaagggcctgatttcatgcctttgctctcctgtgacacagagagggctgtgggagagatgggcagtcaggagttcgggacctcaccctggttctgcccctgatgccctgtgactttgggaaagtctcctggttctctctgggtctcggatcttcagctttccaaggactcctggcctgcctcacctctggggtgttgtgaggcttccgcaacataatacagctgcagatgctacaagttaacccaaagaaagagggctgccccagtaggagatcacagattgaggccagcttgtgatacttcccttgagtctgcctgggcggaaaggagaaggagcacctggccattatatctctgtctaggtgaaacctggaacctggctgagaaagatcagtgttgattagcatctagccacacctcatccctccctctctagaccacccaggtgatcctgcagcaccctcagatcctacagcttggccaatcttggctccagatgggagggagaagatcagatttcatgggtgtttctatataaccccaagccaccagagctgagctcactcctgaggttggtgccaggccctgctgaggatgaggctgtccagagccttcgcttggccgctgctgtgcagtataggtaacgcatggccccaggccctttcttctgggcctcgcactgttttccttttcaactgcagagattttaaaatttgcttattgccaaggaagaagcccatggctgattagctgaaagatactctcttccatacagaatgtttcacttagtgctggtggaagaagagacaaataggaaaatatctatgtcattgtgctgatgccatcgtgatttttaaacatttctgggttcctgagttcccggtcttgatgtgttctgtgaccctccttcctgccttaagcaatgtatgctgagattctgcagggctcacccagaagtggctgagaaaatcagacatggtcttgctttcgaggctttccaggtggtctgacggcaggcagtgtcttggtgagggtgccctgcattgaatgtgtctggggacttctgagggggtaactgtggcccttgggggagcccacagcaggagggagctctgcatctgcccagcgggttgtcacatggctgctgcagcaacttcgggaggagcaataaccagcagctcccaccgctggctgggagtgcctggaagagggggagtcacttgccctctagagggctggaccctgggaattgtgtcaactgcatgaggactggccaactgattttgaatgcaggcaggaaaggaagagggtatagatttcctcagggagatgtcttcgtctctatgtctctcttcccctggcttcctgtttccctcattctccccaccttctttctttgtatcctcctctttctctcccctttccttcctgagctccttgtttcctactctcgtcacttctttctcctctcttgcccttgccgggtcctttccaaccttgcccatttctcctgcgctgctccactttgctgactgcacactcacgtcaggggctgccccatcaccgggtgctctcctcccctgccaggatttcagcctcactgtaggccccagctccacatggctgcctctggctaaagcttcagatgcccatctacatttccaactcagataacagcttacagcttctgtctaaattagggctacagtgaggccttagggcaactggtcataggaaccctaacagcttggtggaaaaatttaatatgcttgacatttggtttcctcatccttggtgaaatcaagagacacaaagacaacttgatgaaaaagagggagaggtgctgagcttaaatgcagaaactaatgagtgctgcataggcttggccaagtcacccaacccctcttaacctcagctgtagaatcggggtgcctcgacagggctgttgtgaggagttagtgaagcaaaagtttccattcaagcaaatttagaaaagttcattactaaagctccctggagtgatcactagcctcacagcctgaaagcttgtgtggttagtgattgttaagtagcagcttcttccccatgcctcaaggcctttgcctaagaatctagatgaaaggaatttaaggtagatgtggttacagtacagaaatgtcactcaatatgacaggcatgttcaggatttgcacttgaggtctgctttctggggaatcgtgatttatttcttccagagccaacttgatagaggccccagctgtggggagactcttctttgcacccacaaaggaccaatatagtctcaggctcaggaaggacagctaagatgtcctggttgactttcttgtcagaataggttgtgtagcattatgaggattgctaatttacttagtaaagaaacatcatctaatttggaaaacgaagcaactgtcttgaaagcgttagagtgacagatcaggtgtatgccaggctaccctgtgctgggcattgggccatgggctcgtgcacccagcttcatcctgtaaggtagttaaaatcaagatgcccattgtatagatgagtgactgaggcttagggagagttaaaaactttgtccaaagtcgttcagctctaggctgctgggacagttaaccagggacatctgattctgaacccgtgggcctgcccgctagatcatagcctgacaatgatcccagtgtcacgtgcaccgtgggacgtatgagattgtgtgcagggctggcttggatcccgttatctaactccagtccctgaatagtgaaatttccataaataaacatggctcacttctactcacttaaaaattttagtcaacagatttatttcaaattcaaattaatcactggttttgttatagaatttacaaggagaagtgtttatatcagagttaaggtagctgacttttattttttcccaggaaagtgggacgtgagacctttagctaaaaaatcaggaatgtctcggataattcaagataagctgactactctatcagagcagtcatttctgaccatggctccagagtgagacaattgaactttaattgagtggaatgggaaaaacaagaatgctgtgagtgagctggtttgtgaatttgtgagtgctgagagccgatgcttccttccatccttctctctgggtaacccagggctgttcccataaatggggacagtgacgccatctcttcttcctgcttagctctgtccctttgtgctcagctctgtccctttgcactcaagctcctcttcacagtgtagtcattttcctttcttctgctttcacccattggtaagttcagattttcatggttttttttgttttgttttgtctttcagccacaactgttaaagctccatttgccacaggtaaatgcagacaagactgttaccctctttcccttgcctcacacagagacactgttttggggttgaaatccaaatggatcaatgagaagggcacgtaccagggataattcttgtccaaaaggacttggtaattggattcagccttcataatcgctaattccccctcccaccctctcagtgctcccctccatgagactcctcccaacttccccaacacctccaagcccccccgaagtctcctctgccctcctgtctgaccagcctgctgggcagggaaaggagccaccactccacagagcctgtgttcctggaggttgggagcctcttctaaacacctggagtctggagatctgaggagctgctccatcctgggtgtcagaaaactgctcctccctctaacctgcttcctccagggtgcagttcttccctcttcctacgagcttctccgtgaggatgcaggctagagggaggagcagtttcttgcgatgcagggtggcttgttgattgattggtggattcacctagtgtttaaccagttgctgggcacaagctaagtgctttagaaactggaacacatttgaccactcaaggaaagtgctcttttcatcctcagtcacactttcggagcctgaggcatcattgaacctcaaggagatggattctcatttgttcagggattgggctactattggggcaggagcactgcctatttgttatttgtccagcctgccctaagaaaagatctgtagggaaatggaaagatagtgtttgtgctgattttctgttcactaatcgggcaatacgattggtgagaaagttttagtaaggggagttaagttcctctatttcccactggtcataaacaaattgtactttaaaataagtgtgggtcacctaataaagtctgaaaccaaaaagcccaccttgtttgtggagccatcagactgggccattaaggttgaattttcttcccaaggatgggaagttgggagaatcagtaataacaggggcccctggaatgacacaagccaatcccagacctagagcatccctgcagtgcctgggccccgtttctcctcttgtagcacccagtgactgtgggggccactacacagatgaatatggcaggatcttcaactacgctgggccgaaaactgaatgcgtctggatcatcgagttgaaccccggggagatagtcacggtggccattccagacctcaagtgagtactggggttgtgagttttctttgatgttgttggtatttctaggaaagatcccatcttgacctcatatggttcaccttccaccctatccatgacagccatttgacacacaatttgacgacattttcacttcctgttgaaagcttttcactggctcgttttctccaaataaagttgattttcttgtcatgcctttctcattcctcacaactggtttctcttctctgctcacttctgatcacttctcctctctggaccctgctatgggctgtgccattacactgagtttcctggacacaccagagtccagcagctccttgcctttgctcacacctgccctctgcctggaatgcatccttcaatccctgccagactcatctgccctctgcaaagggttttcatgttgtatttcatgagttagctcaaggacaacaacctccataacaataaaaccactttcctgactctctgcagaggaggagagatctttttctcacaggggtttacataatacccctggaaagctctacactgaatttatagtgtaatattactcttggctatgactttgtttgtgtctactaggagtctgtctttggattgcaggtatttttcttaaatgaatgaatgaatgaagtgataaagccacagaaggcatttccaatgcagcctaagttactgcattgatatcccagggcagtgttcacagatttcagcatggaaaccacatttccatcaattccagaccaagccaaacacagcccacaatggtggatgagacagatggtggaactgtgtgacccagaggtcctgtcccctccagacagcctatgggctcagaatcccactacgttatgcaggagttctatgggatcaaggacacttcgagacacctgcctcaaatacggggcttaaactgtctacccaacctgaggcccagggattcaaaaaggatgtgtggccatgaagacccagatggggaaacaaggagagaaggagcttgaggagggacctggaatgaaagagtcgtgcacttcctgtgtcataatttccccaaggccagcgggatgggcggctgtggacattttcccatattgtccctttgtccttttcaaagttgattttgaatctgattgtccttggcaccaaggagggacacaggctgggccaagagcaaaactagtataaagtcagccctgtgtgtgtcctggtggggtgtccccttgttgtcttattataccccagagaggctccagcccctccttgtgaactgagacctgctggggcctgaggatgaggggtggagattaggactggaaaagcacagggaggagagggaagtagggaggtctcctaggactgagaacttccatgtgcagcttgtctctcacaggatggagatagagacccctctctcctctgcagtgagtaagcaaggccaagcttatgctagtggggggtcatgcttcacctcttcctgtcccatctgccaggggaaaggaaggcaggaaccagggagtggtgtccacacactcatttctggtgatttttgtcctgacacagaggttgtggtttaaggaaacataccactctgctggctgcattccctgtttggggaacttgaaacacagctgatgttttgactaaaattcctgggttggaatcctagggccatgggctgggctccctggaagacatggaaaccatgagactgggaagccacctgctgccctggtggaggtgaagttttctgggaagatggagggggtgctcgggcccctgcttgcgttattgaagaactgacaaactttccttctttcgttctcatctgtccttgcacttctcatgagcaaagctgttgggatctagtgtggattcattggtggagggaggtggcagcctggctggaggacaaatccaaatgctgatggttgccttttcttctgacccagaggattcgcatgtggcaaagaatacgtggaagtgctggatggacctccagggtctgagtccttggacaggatttgtaaagccttcagtacattctattactcttcttccaacatcatcaccatcaagtactccagagaacccagtcatccacccaccttctttgaaatatattactttgttgacgcttggtcaacacattaataggaagatcgggggaagaggcacctgctgatgctcccctgctctgcctgagcctggttctgcatatgttggacagaggctatacctgggactgcagaaataagattgagtcatagttctcctggatcagcattgggtgagggagagggaatgtgaccctgtgacccttccagaaaaaggtacgggttctgtctcagcatttctgtacacccacatctttagtgttagaagatcatatgtgaaaactttatctttcctgtcttcttgatatagaagtgggtatctctgagaagccatctttctctctattgatcttattatatgccctgtagcattttctagtgtatttctgcaaagtgagtagtatatgaactatatactataaggaatgtataatacacatattctatatgaatatataatcctagaaaatatatataaacaagaaatatatattatatatacataaaatatatataaataagaaacttgtgcctcctggactgagattatacttggtgccctatgagtctctggacacactgaaatacacagcacacactccccatccctaagagacttgtattcagttgaggactgaaaccagcttgcatagagtcaaacagcagcacaagaagcaatggcccctgacacccccatcaggcagtgggtgacagctgcagacactgtgaggtctggggttcacccagctatgctgttcacaccaggcttcccagtgaggtggagctcaggtctggcctccagcatggggaggtctggaaaggccggaataggacatgctgagcaggtgctgtgagcagaggtggagtcacccgaatggggtgaatttaggaacaaagagaacacagagaaaggtgccccctccatctttctgagtgtttcagaaagggcagagctcccagtggggcctgtgttgggcacatttgagtgcatttcaggcacatcgctgaagtggctacttcttccttcaccatgggtgaggtctatctggggacagaagaaggcttggctcctggtcttggttctggatgagtccagttttttttgttgttttgtttttttttccccgggatacttggtcagtccccaggaggcccacagtcctccctgaatgtgaccaggggagaggaggacacagggtcagggaccttccagagctgaccttgtggagtttccctccacccttgaagctggaaggagcatctggaccctgtaaacctcacatgaagcaagcatctctgtctgtcatctaagttgttccagaatgtttgtcttggagcttgaaggatcacctgaaactcacatgtttgaagaaaaaaaaaaacaaatcctagttttggttggcttttctggtttttctaaatgtacagatatggagacacagcaggaggacttgtcctctagctctggtgcacagcacacggtagcctgggactttgtgtgagcaggtcaggtctttaatgttccaagagcatcttggagtagaataatacaatgtgaccagctgaacatgacttctgcttagcgtgctgatgtctttgactggaaaaggtccagggaaaccctggacaaaaagcagagtcaaagaaaaataacaagctacctgtgtccattctgttgctgagtgacgtgcggctccaggtcagactttttacctctgtcaaccatggttttctcatgtgtgaactggagatagaaacatcagaccttttacctctgtcaaccatggttttctcacgtgtgaactggagatagaaacatcagaccttttacctctgtcaaccatggtttcctcacgtgtgaactggagatagaaacatcagaccttttacctctgtcaaccatggtttcctcatgtgtgaactggagatagaaacatcagaccttttacctctgtcaaccatggttttctcacgtgtgaactggagatagaaacatcagaccttttacctctgtcaaccatggtttcctcacgtgtgaactggagatagaaacatcagaccttttacctctgtcaaccatggtttcctcatgtgtgaactggagatagaaacatcagaccttttacctctgtcaaccatggttttctcgtgtgtgaactggagatagaaacatcagaccttttacctctgtcaaccatggttttctcatgtgtgaactggagatagaaacagatgacaaaggaataataatagtgaaaaccattaaatgtttattcaacacaacattctctaggtactaccttaataatgtcatacaggttgtctaatttcatcatgacatgaagtcttttggggtagtattactatccctagtttacttaggatttgagaaggttttgttttgttttgttttctgtatgtttgtttgtttgtttctgagatggagtctcactctctcacccaggctggagtgcagtgtcacgatcttggctcaccaaaaactccgccttccgggttcaagcaattctcctgcctcagccttcctagtagctgggattacaggtgcgctccaccttgcctggctaatttttgtatttttagtacagacagggtttcaccatgttggccagggtggtcttgaactcctgacctcaggtgatccacccgcctcagccccccaaagtgctgggattacaggtgtgagccattgtgtctggcctaggatttgagaaagttagttgaaaataacttctccagaggcacacactgtcatgccagctaggactgtgacgagggccatctgatgcagaggctgggctcctgccaacacgtccatcatgagtgcgagccacagagtcatgtcccagagggaggccctgtgactgcactcagggctcctgcattcaagtccatgacaggtccctgaaatggtgaaaatttcataaattaagatggcttatttctcctaactccaaaaaaaaatcgtattcaataggtttacttcaacattaggttgattattggtctcattacagaatttaaaacaagaaatattcaggtgagcattagattggctgatttttctggtttgcccggaataagaggtttcagggacaggagaatttcagtcctaaacaacaaacgttatcaaaaactaggacgtgaaggttgccttggtcagggctgacttttctgtctgtggctccagagtggggatattgtactttgagtggaatcaaagaaacaagaagaaagcagtgagtgagctggtctgtaaatgctgagagccagtccttctttcctccctgcccctgagggacccagcgttgctcccagggatggggacagcgatgccacctcctctccctgctcagctccatctctttgcactcaagtcccttttcacagtgtggtcattattgattctcctgccttgacctacagctaactcccagcttggcattttgttttttgttttgtgtccttttatggaaaatcaattagccaagaaggatatgaggtaaatgtgggcaatctaatttcatgctttcattcttctcacaaggaggctttgcattttcaggttggaatccaaacagctcacccctaaaaatcatgttctgagacatgttcttggccaaagaaaagtggaataagtaactgactatctgcttaagcacttcacaatccctagatcaccctccctaccaggtgctcaccactatttcctccctgttcctcctcccctctccctctgcaactccaagtcctagggaccttcctctgccctcccttctgggcagcttcctgggcagagaaagtggccacctcctccagagcctgttcccaggagaggagactcctgtaaacccctgaagtctggagagctgaggaacggctccatcctcagtgtcagagatgagagcattgaaggaagagcgaagaactgcagcatggagggtgctggttggagggaggagagtttttctcaggatataggggacttccaaagtgtttatccacctagtgcttaaaaggcagaaattatgggctcaattatgggctaagtgctttacaaataagaacacaattgatcctagatcacccactgtgataggtacaattatcgtgacaatttaaacttatctgagactaatcctccttatctgtgataatggaaaacaacaaggttaaggaaagttctccaccatttttgttctggagaatggcttactagaaagaccaccctcacctgtatgacttagataagactcatatgatcccacattttccttaggcaacctggacaccccaaattctcactcattttctcttcaatgattagctgaactattttccttccttatcaattgaaatgaaatgcttgccaaattgacctaaccaaactttagttaagctggtctcccaccacagcttccccacctttgattcatccctcaagataaacaagcactgcaaagcagaataatcctcccaaagacccttctggaaatgagctgaccaggagacacaaattcctggtcacctgtcacactacctgctcatcccatctcccaccctcagtccttctagcttctgtcatcctccctagaaaccaaattcctttctctctgacctctgagatccttgccaatcctctggttggagcattctcagtactgctataagcattttgaataaagtctttgtattagtccatttctacactgctcataaagacatacatgagactgggtaatttacaaaaaaagaagtttaatggacttacagttccacatggctggggagcagccacaatcatggcagaaggcaaggaggagcaagtcacattgtacatggatggtggcaggcaaaaagagagcttgtgcagggaaactcccatttataagccatcaggtctcatgagactcatttgctatcatgagaacagcatgggaaagacccaccctcatgattcaattacctcccactaggtccctcctacaacacatgggagttatgggagctacaattcaagatgagatttgggtggagacacagccaaaccatatcaatctatttaaagctacgttgggatttggtttattatttgacaatcttcctatcacactttggggacctgggcatcactgagcatgatcgtgcagcctcttctgacctgtctttaaaataagatggattcttgtttgtctgaggtctctcttgaggcaggagaacagcctatttgctatttctctcccctgtactgggaaaagacctgtagggacacacaattgagaaggtgccggctttctgatcaccattctgccaatgtggtgatgcagtatgctatgatgatggtgttaaagttctactatctcccactggtcaaaaacacattagactacatatggaactgggtcccttaaaaacctctgcatggagtaaaacaaaaagcccaccttgtttgtgtgatcatcacactccagttacctatgttgttttcagctgtcacataacattttaaacagacgttggtatctctatgaatatacccagctaaggtttttctgtgaaatgtagagattaaggaatagaaacctcttcaatcatagttcaaatgtgcatgaccatatgtatagtcaactctccataaaaccagtagttctgtcttgctcgtgatagtagttggcctacaaatgatgcttaagttcctgctatgtataaaatgaaactttcgataatatttatggatgagaatcagttaaatgctctttgctttgagtggaaagttgacttcaaatgctatcttgggtgtttgaggtgggatctaacctttttactcctcacttacaggctggtgcccttctccaattgctgttgggttaacttgacatctttgaaggctcctggaaccattttctactgaaaaatatctgtggccttctgggaagacatcctctcctaacgagatgaaagttcagtgttttagtgaactgacttaatggctattactataccataatctagctgggttagtgggttgggccattcttgcattcttataaagaaatacctgagactgggtaatttataagaaaagaggtttaattggctcatggttctgcaggctatacaggacgcatagcagcatctgcttctggggaggcctcaggaggcttccaatcatggcagaaggcaaagagggaacaggcactttacatggcaaagcaggagcaagagagagagagttggggaggaggtgccacacacttaaacaaccacatcttgtgaaaactcactcactattgtaaagacagcaccaaggagatcgtgataaagcattcatgagaaatccacccccatgatccaatcacctcccagcaggctccaccttcaacactggggattacatttcattgtgagatttagagggaatacacatccaaactgtagcagtcagggacccgactgattggctggccaatctgattcagtacttccgttttgttttgtttttttttttttgagatggagtctcactctgttgcccaggctagagtgcagtggcacaatctcagctcactgcaaactttgtctcctggattcaagtgattctcctgcctcagcctcctgagttgctgggattacaggcacccaccaccacatctggctaatttttgtatttttagtggagaaagggtttcatcatgttggccaggctgatcttgaacttctaacctcaggtgatctgcctgcctcggcctcccaaagtgctgggattacaggcatgagtcaccatgcccagcctgattcagtacttcttatcatgctgttccaaaacaggataatgacaccagcaagaatcacaaccaatatttgttcctgtatctatatttctgtataaaccaatatattaatatatctatttatctacctccatttacctgcttcttccaggttgactgaatgctgagaagaatcacttgctattaccttagtgaatgtcctttttgttacaagtaacagaaatacactttaggtagattgagcaaaaaatgaggaaatttactgaaggattctagagtaagtctcagaactgaaggggcggtgtagacagggaagcaatttgggaagctaccctcacctctctatttttgatgccatctcacctgacccttgtgtttcattctcctcccctccagcctggcgacatcctcttctctgtgcacattgtagaggacagctgccttacagctcagctcccaagcgtgtctgtttgtgttagtccattctcacgttgctatgaagaaatacctgagactgggtaacttacaaagaaaagaggtttagttggctcacagtttcacaggctgtacaggaagcatggcgctgggatctgctcagcttccagagagggctcaggaagcttccaatcatggcagaaggcaaagggggagcagacacttcacagggccaaagctggagcaagagagaggcagggggtggggggtgtcacacactttcaaatgaccagatctcaagaggactcgctcactgtcacgaaaacagcaccgagggtatggtgccaaaccattcatgagaaaccctcctccataatccaatcaccgccccccaccaggccccacctccaacgctggggaataatccaatcaccgcccccctccaggccccacctccaacgctggggaataatccaatcaccgcccccctccaggccccacctccaacgctggggaataatccaatcaccgccccccgccaggccccacctccaatgctggggaatcggggggtgcaatttgacgggagattttgtgaggggacgcagattcaagccatatcactgttcatagttcaaaacgacagcaaagattcgcttgcacctctgatttctgtctggaaatttccagggagagactgatttgtgtgaattcggttgaggatccacctctggttggatggctgatcaccagcaggggagactcatagagcacaaatgtgggggtgcccattcaggcagcactgggctcaggtttcagagggaggttggtagggccccaaggagcagtcattccagaaactattacagtgtcacctgtcatgtctgcctggccgacatttttttttccatattgctcttgaatttgagtttttatgttatctttactgaatacttcaggtatccagtaggaaatgagtgcttaaagagaagaaattaaaaagggaaagttacgataaactgaacatgaccagtggaaaagtgaatccagcagaggaatgaggaaactgtctttgcccatcaaatattctgccttttggggacatattgttgaccttggcaatcatctgtgggtgagggaagatcagcaaagaccatttgttctgtcgtgctgacgaagaccagatatattaagcattcagtgacctctgtctctggagaggtgacatttcggccaaaatgtgcagccagctatctgcagaaagagcattcctgcaagcgcagaggatctttagcaagagcaaactaggcttgttctgggtgctcaaagaggttcagtgttgctcaagtgagtgagggtgggggaagaggaagaggtgagagcagagaaaggaccaggggacagaccaggggaggttttgtaggccactgttagaatcttggatcctgtttaagtgcaagaggaagcatggaagggttttacattcatttcctgctgtaacagagcaccaccagctggatggtttagaacaacagaaacttctctcacagttccagaggctagaagtccaacagcaagctgtcaacagggccacacttcctctgacggagctagaaaagaatgtgtctcaggctgttctcccaccttctggtagcctctggtgttccttgacttgtagatggccatctcatccccatgtttcttcacatccttttcccccgcaagtgtctgtgcccaaattcccccttgttataagcacaccagttatattggattaggttccatcctcccaactttgttttaatttaactacctctgtagaaaccctatttccaaataaggtcacattctgaggtactgggattagaacttcaacatatcttttgcagggagggagacacaatttaacacatagcagttttaaacaaggaagtaacataatgtgtttaaaaatatcactctggctgctaggtggattgtgagttataagagggtccttttgaagagcctcctgcattagtccaggtgaaagatggtggtagtttggatggagagaaatggctgtctggctgtagccttggcttgagcttgcggtacaggcaggaagtgaggcagcttgaagccaaagataataatagagattcagatattataaactcttagctaacatgaagtaactatgaagtactcactaagcctcatgctcaattagctgttcttattctttcccatgaattatctcatttaatcctccaactacctatgatgtagacactataattgcctctactcacagatggggaacatgaagctgagcactgcctagaaacctggctgagatcccacagctcacctgatattgaagcagctattcccacccatgtctgctgctgccacgtccaggctcttggtgacgtctcagcactctatttcagaacacgctgaaggcttgtttgctgagactggagatttacggcacagagggagataacgttggttaggtggggctcctattttaattatttatgagtatttgtctcattcttcaactatttataagcttgttgatggtagagtccaggctctctctctctatatatatatccatatagaggtagacatgggtgtgtatatacccatatataagtatatatatagtctggactctacccttaacaagggtgtatatatattcccacacccatatatagatatatagatattcagctatctatctatatcaatgctaatattgagctattatcatgttctgggcctcgttctgaatcaggttttcttaacctcagcgatattggcattttggtcaggtcgttctttgtcgcagggctgtcctgtgcattgcaggatgtttagtagcatctctaccctccgctagatgccagttgtgacaaccaaaaatatctccagacattaacaaatacctcctgagggacaaaattccccctagttgagaattactgtctaatacctcacatttaacatatccaggagccccattaggcagctactcttctgattccatttgtgggagaggaactcgaagctcagagatgttgagatagatgtcctagatgatacagccagggttcatataacccctccaacatctgagctcatggcagatgttgacaggacacctgctggatggattgcaggtagctttgacattgaggcagagatgtttatgcatggctaagcattataggaaaccatgaaaggtttttgaccagcgtagtgatctgagaaaagcagaagtttacagaaaactcaaagactccctcccatcttcaaagataacttcatatttgggatctttgggcctggggtcagaagggattagagggtaacctcatccaggaagggaaatgttccaaagatcaccgatgcttttctgcttcctcctttcctcttctcttatgaaattttctttctaccaaattacataagatcctctaggcatcctgcttcttgtcactccccagacattttggtaataagagcataaggattaattacaaccccctgtgaatgtttaatgcaattactgttcactggctcccagtaatttccaaaacataaatgggcagtgaacagacaaaatctccatttgccaacaaagctacaacttggcatttaaattaaataaaaaccacctaccatttttttgacttttatttgaaggtcgggggtagcatcactgcatgatcaaacaggaatccaacgcatccattcaattattactggttgacaaaattgtatgagacataatgaatgccaattgattccactatagtcacattaaaactgacatagcattaaaaaaagaaacacttactaaaaatccaggaaagagacaaaagaggaaaaataggcactcaacttcttcatgatctcctttccaataaaatatcttgtgtgtagtatgtagagtgttcctcataaattcatcagaagaaatcattcttcttcctttttgatgcagctctggatttggggaactcaagaggttctcctttgcttaatctatttctccttacagtccaaggcatctaatccccttgtctatgggcagcccttagtgctcccttttatctctcacattgtcaaggttttggtgacagcattacagatagacatgaccactgtgccccaccctgactcactcatacccttttaatttagatgttcccatcccccagagcagaaggcacttcattcatattaactttattttctaactactttgattactattctatcaactccaaagtggtcaagtttaagtttaaagccttctagtctcttaacccagtgcagtgcattctcagtgtaaagtggtcatgtgcagggcaaacagtagctcattccaatgccactggggctgctctccaagagccaggtgagaaacccatcctgaccagagcaaggtggacttggggccaattcttctacaaagggaaccatctctgaaaatggtataatatggtaacaaatggcggtcttgttctgtgttcatggtcagctgactagagcaaatagctgggtgactgagataatgtatggctaactcaatattcaagctgcctgcatttctaagcacctatatttttcattcacttattcattcattcattcagtctgtaaccccaaatctagcttgagctcactggcttcttaggctctggaggaggcaggctccacttctcaatttccctctggttgaagttcaaagccttctttgggatttctgcaaactgccagcaggctgtaggacaccatttccacacatgctgtctctcttctgaactctctgcctgatatgaaactcagccctgtcgtcaattcacaaacgccagtccccgaagctcattcatacaacgtactcatgaatttaatgggcttttctgatggtgagggtctcagggagtaatctctggagctctgcatagcaaacaacttacaacaacatgttaggtacttctcgtctcaaaagcccacagcctccttgatacgtggggttttacatggctgtttatccccatgcagtggggtacatctcactagtggctgtctcttcttcctcccttcttccttttctttttaagagaaaaacaaaattcctctcatttcctcatgcaaagaggctaaccattctttcattgttaggaggcttctcaagtatccccttccagccccaaataaactgtaaggtatttttccccaagaaaaacaatttaccttaagataattttgggtgccagctcttaaggaatataaatgctgcctcattatgattttaaaatcatttattgaagtacatacagtatgttaggtactagggatactagaatgattaaattgggcttatgcactggctacagaaatggcttgtcatccagtgggttatacatgagacagatggcatgtggaaggaggaaggcagtcagtgagagggaagaagcagagtcaagttgctatgggatccctgaagagggcaatggatttggtttagggatgaattatagaacgagtgcagtgtctcttcaggaaatggaggtaaatgtctggtcatatccaaattgttagccagatgttttacctcaggattctccagcttgtttttgtttgtttgtttgtttgtttttgtttttgttttgagatggagtcctgctctgtcacccaggctggagtgcagtgacgtaatctcagttcactgcaacctctgcctccttggttcaagctattctcctgccttagcctcccgagtaactgggataacaggcatgcaccaccatgcccggctaatttttttttttttcttttgtagagatggggtttcaccatgttggccgggctagtcttcaactcctgacctcaagtgatccacctgcctaagcaccccaaagttctgggattacaggggtaagccaccacactcagccttctttagcttgtttgaccccaatttagtcacccacttctgacaccatcatcataggtgagccctgtctgatttcacagggccctcgtgagtaaggggtgagaccacattaaaaactatatagcctctaggaatggagcaaatgatggcgtctgtttacaaaagcaattctaaataaaaccaataccaatttataagtaaaaggaagttcaaggaagttctgacctgttcaataatgactactttcagcttatatgaaaatctactatcagattcttttcctccaaaatatctatctttctgttttttgagacagggtctcgctctgttgcccagcctggagggcagtggcacactattggctcactgcaagcttcacctccaggattcaagtgattctcttgtctcagcctcccaagtagctgggattacaggcatgtcaccacacccggataattttcgtatttttagtagcgatgggttttcaccatgttgaccaggctggtctcaaactccaggcctcaagtgatccacccgcctcagcctcccaaagtgctgagattacaggtgtgaggcaccatgcccagcctatttatattttgttttcgtctgctggataacccaataataaacttttggtaaaaatttaattgatcacttgttctccaagccttctttgttaatcagcgttctcagggaacagggattgttagaaatttcagattaagcaactgattaccagagctctcttttgtgtccagtgctatgtcaaagactttctaaattcgtcatcaccattagcataatctactgagcataagagtctcatagggccttgtggtcacttatctctttatcaaatattatcatctggatgtatttatgaaactcaggtaagtggtgcttaagataaataagtacttaatccagggaattttctaaaaccttcaaaaattcaaatccgaatctacatttattttcatatagacttcctgaaagatggcatacacatacatggtaaactgtgggcatattctggatggctccaggtaattaatgtttacggcaattaatatcacacttatcaagaagtttggtattgataacagccagtaaggcaatatcttggcattctgttgacctcttctctttccaaagggttgaatttgttctcataggtgatttccgcatctcagagaatttgggtcagtgaaaatatctctatgccagcaccacctggccttcttgtaacacaatacttaggttgtaactgtccacactaagcaggtggtgagcagtcggcaagtattgagtcaactcccaactccactgaacgcagctaattaaatgaattatagaactgagccttgctgaccatttagttcaatgcactcgtttaactgatgggtaagttgagtcacagagtgcctggtggcttacctatgcctcacagctggttgggaacagagctgtagggagagcactgatctccttatttctcctttagagaactttataccacatcatattgctgatcctaagcaatttttagggtccagataaatcgttttcagttttttcaaactggcttgagttttcaggtgatgctttggtattcactattttatacatatttaggaggttatatcaacattggaaataatattttcctcccccccccaccaactccaatttctaactttgcctcagctgaaaagttaacccatttctttgattcatgctgattctttagtcagaatccactgatatttgggaacaatgctacactgcccagaatcactgtcttggccacagcagctgctgatagaatacttcaaaatgctcttaacttggagctgtggctaatggagttgtcctgaaaaatcagaaagggtgaagcctcctgctaatgacattccctctgcttggaggggagctgtggctctgaaagggctgattgtggaaaatccactggcaagagggagctagaaaggaacctgaccttgcctcaggcagttgtaggtccctgtagacaagttcactgtcttcccaactctgtgaggagttgctgaggacacagtgtgattaacggaggaattcctctatgcttcagatgtagacagtgagtaagtgcatcatgcatctcaaatggtgaaggtgctggctggactcagggtgagattgttagggaaacagggtgacaccattttaaaatcaactccatctttaaactagcaaggcacattccttgctggtcatgacccatggtcatgaaatgtttctggctgaggaaactcctactacaatgaaatgtccagatgtcccgatatcacataataatatatgcttttaagatgattctagacatgctttgatgtacctacacactaaaataccaaaaataactttctttaaatcaacaaagtaatacattttgtcacgctgttagcccaccctcacattgtcatagcttagcttttacatagataagacccttgtataagaaaaacttaaagatgatgcattcctctgcttgctttctgaggacgccccactctgtaactgagtagctttcaataagctatctcttctctgtgctttctgcaactcaccttgaatttcttcctacacgagattcaagaccctctcttggtgtctggatcaggaccccctttttcggcaacaagagttctgtcttttggggaaaaaaaatcctcatttcttctagacgtctaaaaatgcttcacttcatatttacacctggaactcgagtctgacccataagatacttaggagggtgagggcccacgtctctgtgcagcttagggtctggttgtcccccaactcctattgcccactgattaatgggcactccagtttttcactgaatagctcagcatcaagaaaatggcctatgagcaagcctacaatttggaacagttccctgaggtcatggacaattgccagctgtcttctgtcttgattattaggaaaggagggaaggagattggactgacatgtccaggttctatacaggctatgtgtgctttgaatttgatgaagtctgtgctagccatgaaagtctgacagaatggctatgagttggtggctggttgtgagtgtggctcagagcaggtgtgagggtcattggtgaaaacttaagacttgtcatgagaactgcacaataaacaaggtcccttggcagtgtctatgtgtgtgtgtgtccgtttagaggaggcagtgtacagggaagaggctagaaaaatcctggcttcaaattctttcctcccatgagaacccattttcatattttgaagcaaacctggaagggtcagcccttctctgagccatcctccttgttgatggccaagcatctgtaagaaacaagagctccatcttggtaaagtctgactaccctagttgttgtctactatatctgccacattggggcacaggcaaagccttgatagttgcagcaatagtgacctcagagacatttggtacctgctcctgacatgcccaaaggaattgtgcatgctacagccatgcctgccctgtggctgcacttgacttgatggggagggtgtggactgcctggctgcattgaagatgagggtagcaaagaaataaggctggaaagggctggctctgccttccaaggcagaagctgtatgcctgggcaggaagtggagagcatgaaatagacctccaacttttagatgtgggcatagcgttcttttcttcagttgtactacaggctgctcccagttccagagactctgctattgactgtctaatggttccaaatattcccacttctttgtcttcatgtcttttgcagtgtggcctctcatcaagggataaagttcatttacccacttttgcatctaggctggcctcaggtcttgctttggacaacagaaatgtggcaaaagtgacagtgtgccagttatgagccttgatcttaataggccttgcaaacttccacttaccctcttgggccccataatgaccctgtgaacaagcctgggctagcctacgtgagggaggaaaaatgtggcccagtcacccccatggacccagttgatagctgtcagttcccagaaggagagccaactaatttacctgcagttaactatagacacatgaggaacccaggtgagatcaggagaggcacccagctgagcccagcttaaattgctaacccacaaaattacaagcaaaattaatgattgttgttttaagccactaaatttgggggtgatttgtttcatagaaatagataacagacacacaccccaatgggagtaggttaggagaaggctgggctgttgctgagggtgggagcgatagccaagagttgcctgaggtcaggaagcctcgtcaggtaggtcttaccttgaggccctcctggagattgggcaggggaagccaaaatcccaatataagatggggtggcaaggagcctggggcacagctgacgggaataataaggactagtacacctggttaccctgggcaacaaataaaactttaataatgataaggagttgctttacgcatgcgctctttccagatactctcttcttccaggctgtaggtcttgaccagatcactgaagtggtctctccgtgatataaaatcctgattcattagcattaagtcaccagggaattctgatatgcagaaaagatttcggtttgttaggcctgcgatggaccgttccggtttctttgtggggaggaatgatttgcgatcatttccatggtatgttaaacatttttttggttcttttgacttgaaaactacattcatttttatttctcgtctttttgtgttttttccctctgcctcctctttcttatcttggttggcatcatcacaattatgggtgtcatagttgtcttcctttcgtctggccttattttttgccattggacccaggcccaccccagacagaaatgaggagcgtgtaaacctttcaatgtagggtaaaggctgatgatttcccagagcccgagcaagcctcatcctctctatgtgcttactgacgttcacctgctctcgttgtggcattttaaatgcctccaggggcgcaatcacctttgctgtccatattttttctaggggtacacaaatagcacaaggagaggaatgtttctttttatactccattgcttgtttgtagtccggagacagcaactgtagttccttgagcattctgcattcttcctcttgcttgtaagccaaaagccttcttgctgctatggtgtgaatgccacctagacgctgacaatggagaaaggactattaaaatctcaagagcacaggggcaggcggcacccacagaaacttgctagtggctggttctccctccattgtggaaagtgtttgagcctctctgtagtggaaaacaggtgaacctttggcgtcagataaccttgggttcaaatcctgactctcctctgacctacaatgaattcagaataattttgttgactttacagggtcatggtgaagcctcgacaagacaacatatacgaaagtgaccagtgcaaggtaggagctgaagaaataactgttccatcatttgttatttactcatatttgtaagtgggacgtgtcaataagagtattttgctgtgggccgggcgcggtggctcacgcctgtaatcccagcactttgggaggccgaggcgggtggatcatgaggtcagaagatcgagaccatcctggctaacaaggtgaaaccccgtctctactaaaaaaaaaaaaatacaaaaaattagccgggcgcggtggcgggcgcctgtagtcccagctactcgggaggctgaggcaggagaatggcgtgaacccgggaagcggagcttgcagtgagccgagattgcgccactgcagtccgcagtccggcctgggcgacagagcgagactccgtaaaaaaaaaaaaaaaaaaaaaaaaaaaaaaaagagtattttgctgtgcaagtgtggaagccactagcagattcagccaatgtgagtctactgtttgagaggcagctctgttactggtggcttctgaacctttggctccctctagctaaactggctggcttcagtggggcctctccgtgtgaaaactgcgggacacttactaggatctctttttccaagggggagtatttcccaagggcaatccgtgggtctgatctgtagaatttgctccatatcctgcaagaagagaagcaggaatatcagaattctggaaaggctcttcctacttttccctcctggagtgggaaggctcataaagggttattctacactagccaggctgaggccgccatgagcaggggtttctgtagccactgggtaggcttctccacttggcctctttctgacatggacagactaaagtgcaagtcagactcaccgcaacggtgaagcagaactcagatcctcttggcaacacgttggggcttgatcctgaaaggaagagttggtattaaatattctaactggcttttcattcttcctttcttgcaccattgtgtcactagccctctgtttttcaatcctctgacagtcattcttccattctctgatcatactccggcaataagctaggacgggaggtgttcacacctggagtttgtttctaagacaatgtgatgagggcccgagggtaagtcacaaacatttcttgcatcataactggcttacctgggggctattgtgaggtctgagtttaagacattgaatgatcccctggggtgaaatggacacacattaccaggctcctggtgtgttggagtcgaagagaatggatagagaatgtggctgggaggcaatctgaccatgtcactgccactgaaaaacccacaagactgctcagttttcacaagaggaagactcagtcaactaaaatctctctcactggctttcactagtctcttcagccttagctcctcatgcttgatcaacgccacactatccatcattctcaaaacaagcgtctgagctattgttcacagtcccctcatgtgttgaataactctcttatccttggcaacttgcttgtctctcaggacccagcttaattgttgcttcctctgaatgtctccttgcagaataaatcaccctttgtccatgttctcatagcactctctgcctcatgctatggtgctttctcacataatgacttgcttggtaagtcagatttcttggtaagtctgtctctccctctattgaaagaaggtaccaacagcatcttattcttctttggtgtgtggttgtcagcatagggcatggtgtagggcagatgctcagtttgctaactcagtaaacaattgtcctgagaccctgttcaaaggtgtggttaagaatggcactggtgggaattgatattgccaaaactctatggaaggtaatttggcaatatgtatcaaaattataaatgtatttgccctttcacccagttatgtgtacaaaataaattactcccaaggttggtcagtgtgactttgtttgaggtgacaaacctcatggcaaattcaaatacccattaaccagtaattggtcagagaattctagttagccatacaatggagtataggactataggagtcaaaaagatcaaggaaggaagacctttacttatatggaaataactccaagaaacataatcaaatgcaaaaagcaagatgaaaacatatataaattctagaatactcttttgtgttggggagggaaaaaataagcatgtatatatttgtatttgcataaagaaaccagaataatacacaaaaaactagtaagacagtaggtattcagcagatgaagaagtggtgggaatgagccatttcatggtatacatgaagatattgtcttgaatgtagaaccacatgaatgtattaggtatttgaaaacataaatttaaaaagtaaggaagcagctcatggaaaaagattgccatgttatcgctgacaaacacaggtcctaaaactcctttcccttaccagaaatccatggtggatattaagagttgggccagtgttcagacccatgtaggcactaaaatacagaggtacttttccagttgacacaggcaaattcagttacctggaccatctgtgagcctggacatcagcagagggcctctgagcagtgaagaaaatgccttttgcagtgcattcattgactttcccatgtgtcccacactcaactgctaattaagtgaccttgagcaagccatacaacacctggcacatcatatgcattcaacaaatatttgtggaacaatcgatgggattgttggactccaattgatggaatatcgtgtacccattaaaaattgagtctaaaaaattttctgtaatatgacataatgggatgcaaaaataggcagaatataaaacttatatagggtataatttggatgctgtaaaaatacaaatatgcaagaggaaaaaaagaccaaaaggaaatacacagtgatactaaggttacttcaggctatgggcttgtggggatattccagggctgatggtgcatcagcagcctggtcaactccagatatttagatggaaaagttattgccctgccacagcaggtacagacaggtaaaggtgtcattgtcagggtccagctcctccagacttcagagaaaacgagggtgagaaaggatacacctgggcggggtgtcaccacagccatgaggctctatactgtgggaaagtctgcttttctcacacctggttccacaaacttctgcttttagctcacttccttctctccttctctttcattgtcattcccaggctttttgcttttgttttcttttacagatatttcccctcaattgtttttacattaggttttattcttgacttttacctggttttgtcctgacttgtattcatagacatcaatctcatctcctggtccattttcaaattctcttgaactgcctttcacatctgtctttcatcttttacttcatgttttctttatttctttgtcttgtagactttatcttttatacatatttcatttattcttaatatttataattaatatttgtacacacacacatacacacatatatataaatatatatacacatatacatatatactaatcatatgagagagagatttattatctattatttattttagggaattagcttacatgattacagaggctagcaagtgcaaaatctgcagggtaggctggcaggctagaggcccaggaagaagtcagtgtttcagttcaagtccaaaggccatctgatggcagaattgcttcttgctcaggaaaagtcagtcttttgttctattcaggcctttgtgaggctcatccacacaatgcaaggcaatttgctttgctcaaactccaccgatttaaatgttaatctcatcccaaaacactgtcccagaaacattcagaataatacatcataccaaatacctgggccccatggcctaatcgagttggcatataaaattaaccatgacacctacttatagttcataggtttttaataatttgtttaaatgtattatagttttaaaatatcaggcttttcgtttctatacataattttacccattattgaactttatattaacagattcacatagtatgtgttcctttgtgtctgctttgtgccccttcttatgaaaaaaaagttacaattctcttactgatatgcttgtacattcctttttattgttgtttagcatgatgatgctatgatttatttatcagtcatctgttgcttacagttgggtggtttccgatttggggagcattcttctacatgtctccttgggattacgtgcatgcttttctctaccaattcacattcccaccagtagtgtatgagaatccctgtggatactcatcttgccgatacaggtagattggttatggtatcttggatggttttcatttacatttttctggttagaaataaaattgaacactttttctattggccattgagattattctttgtgaaatgtctattcaagtcttttgctcactattttctagtttttgttttcttattgatatgttagatttctttatatgttcttgatataggccctttgtcagttaaatgtgttgcatatacccactcctactctgcaattcacctttttactgtctttaaggtgtcttttgatgaatggaagtccttatttttatactagctgcactctaatttatcagcctttccctttatggttagtgctttcatgtcttgtttaaaaaatcatctcctacctcatgatactctcacatattatacacacacatatacacatacacatacacacacatagatacacatacacacatgcaaatacatacacacagacacatacacacagagagatacacacacacatacacaaatgcatacatacacatacacatacatatacacacatatacacacacacacaaacacacacacagacacatatacacacacatatacacatacatacacatacacacagagacacataaacacacacacatacacatacacacacccagagacacatacacacattcacacagtgatattctcctatgtcactctctaaaacctttgatatttttttcttttgaagtttgttaacgtcttatcctcattttattaactttatttttccaccttattttcttttaagcatattttgcaacttatttttataatggctatcaaaaagtgtgacggtgtgtgaataagtcatacacaaaaccctggggactcctcaccctctggcagctgcccctgcagccatccctgggctctggctccctctggtggatcttgcagaggctggctctccaaagacccatcggccatctccctctctccaaggctgagtctatgcaggtagccgccttgaagcgtggaaatggtgctccttcttaacattgcatgagatccacaccttgtataaggagctgtgctctttaaaatcgtagtctcctctacaaaaccaccagctcagggcacaccacattctgggaagtgtcctctaggtcagtgcttctcaaacattaatgtgcgtgtgaatctcctggaggtcttgtggaaatgcggagtctgattctgcaggtctgggccaggacctgcacctctaacaagttcccaagagaagcaaagttgtgactctctgtgtaggtcactcaataagaggtgatcctcaaagcatgtccctgggccagcggtggcagcagcagcatcacccaagacatgcagactgtcaggccccatacagaactactgagtcacaatctgcatctcagccagttcccgggtgaatggcaggcgtggtaaagtgtgaaaggaatctggcccgggcaatgttctcatctgctgcctgtgaaggatcagacaatggacagcctgtgcagagcacctgtggacagaattctatgggttccacagcaaagtgcctcagacgtcccggtttccaggctgagccttcacccttcttggcatgaaagggtcctttgatgcctagtttcctcagtctccttcctttcggcacaagggttgaggagacctggctcagtcagccttgttccaaaccattacctaggaatggggtcagctgtgcctctttgaggagcctcttttgagaggttcacccagaagagtgagacccaggagcaggagaggccaattctcatttagccctctgggagtggtttcagccacaatgaggtgtcataagcttgatctttgcttcttctgtctctcttaggggagcagattattaactggggaagtcaaaaccctaaaagggtgattttcatcaaacttcagattctagtcaacaatgctgacattcctgcccacatgtgtcttttattttcccccagaatttctgctgggttctttgcaggccctaccaacaagcactttccctctgagatggagtctgtcccagtgggggccaagcagatgaaaaacagcatcagggctcatgaggagagatcttctctagcctcccttggccaattaaatggagatcattgtccaacaccatattatctttctgaaaggagaccttgggaatccccctgtggttgcctctgctgctattaaaatccactgaagggcatgaggaattcttttttgaagtacaggagggcttgggttcttgaatttggagaggtaatatggtaggcgttcatcttcacggtaaggccaatagatgcacattttaagagccaataggctcggccaggcacggtggctcatgcctgtaatcccagcattttggtaggccgaggcaggtggatcacgagaacaggagatcgagaccatcttgaccaacatgttgaaaccccgtctctactaaaatacaaaaaattagtcaggcgtggtggcaggcacctgtagtcccagctactcgggaggttgaggtaagggagtcgcttgaaccccggaggtggaggttgcagtgagccgagatcatgccactacactccagcctggcaacagagcaagactatgtctcaaagaaaaaaaaaaaaagctccaaaaaatatgtctctagatgcctgaattttctctttagaaatgtggtcagttgagggcacagaataaaaccctgaggtattagttgacttttctgatgggttttgatgccatgatcctaataaagagatactagagtatgatggtcaacagcatgggtatgaagtcactggcgtgctagtaaatgttaacaaccggctctctgaatgaagttgacaaatgtagcaaataaaaatacagggcatctgttaaatttgaatttcagatatgtctcatttacttatacaaagaatttttcatttttattgaaaattcaaatttaattgggtatcctgttattatcaggcaaccctatttctggggggggatgtgagcagaggggtgcctctcgctacttgccagcttactatctctttttctttttaacattaatgcctatgtcattcttttccttccaacttttatttcagattcagggggtatgtgtgggtttgttatacggataaattatgtgtcacaggggtttggtgtacagattattttattgcccaggtaataagcatagtatccaatcagtagtgttttaatcctcactgtcctcccagtaggccctggtgtctattgttcctttctttgtgtctgtttgtacccaatgcttagctcccacttacaggtgaaaacatgtgatatttggttttctgttcctgcattaattcacataggagaatgggtttattcttttaggttgactccatgtctttgctattgtgaataatgctgtgacggacatatgtaagcatgtgtttttatcatagaatgacatagctatatactgaatcacgggattgtcaggtcaaatggtaattttgttttcagttctttgaggaatctccagactgctttccacaaaggctgaactagcttacattcccaccagcagtgtacacagcttactgtctctagggagtcatgtaaactgggaagcctctgtttcatatgtacaactaggatagtaatatgacctgtcttagagggtagttgggaagatgaagtgagaagttacattcatggaaatgctcaataaagagcttgagggtcctggattgtggcaaatactagtctctgaatattcattgcatcactccaatcgtcacaaacaaacattttggtccaagaaagggtggagtccaccattgtctctaccctctccaaggaactcttgttgagttcctgctctcaagtggaatttattcttgacaatcctgttgtgtcttctgacaaactggacgaggtttgtcttagcgtagccttgtttctggcaaggcagacaatatctgcttagtctcttcgacaactttcatctatctaaaacattctaaccccaagggggcattcgtcctccctggggagctggtgggctggacttgtagtaggtttctggagccagtgatgagtctaataggttatttttattttagggacagattatttatatctaaggacaaatatttctaacattttaaatttctttttgtagtttcattgaggtataattgatacaaaataaattacacatatttagatatagaatctgatgggctttatgtatataaacaaccatcctcacaataagataatgaatatatccatcatcctccaaagctttttcatgccctttgtaatcgctctctcccctcacctctgtcccacaaccactgatctgttttttgtcactatagattactttccattttctataatttttaataaatggaatcacacagtgtgtactccttctaaaaaataaactttttgatttggaatatttttagattaatcgacaaagtaccccacgctatatatgtggaggctgtgcatcgtctcatccctctgatgtaggctgtgcctcctctgatccttcacaggcagcagctgagggcgttgcccaggccagcttcctttcactctgtaccacgcctgctattcactcgggaacttgttgagatgcagattgtgactcagtagttctgggtggggcctgagagtctgcatatcttgggtgatgctgctgctgccgccactggtccaaagacatgatttgaggagcacctcttattgagtgacccacacagagagtcgcaactttgtttctcttgggccagcagcgttgggctcatctgggaatttgtttgaggtgcaggtcctagcccagacctgcagaatcagactctgcatttccacaggatctccaggagatttatatgcactttagcgtttgagaagcactgacctagaagacactttccggaatgtggtgtgccctgagccgatggtgtcgtagagagactatgattttaaacagcactgctcctcatgtcttcacaacttccctgaacaatcaggccggagatcctcttaagtctccataggccaatgcacaaatgatttagccgttccaagacgccattagattatggaggaagggtgttaactgtggtttctcttatctttaaataacaacttcctgtattagcctggcatgaagatggcgccaggcaaaccaaactgtgattctgctagtcccaccaaacaagacagggcaggggacaagggggatgggagcctctccatatttggaatgttcctttctgcttgcaagcaggcaccagtgtaccagcttggtaactcatttaaatatacatatatttaaaacaatagtcataaaggttcttggaatatggattgaaaaacaactacacctgtaaatatagattatggctttaggatagcctaatcataagcaactagtaggatgattaagcatgaaaaaaaaaataaaccttctttcgatgtaaaagccatcaaaaagttaccaagacattcctcttcttaaggaagtttgtagttatcatttattttttacaggattattgaagaatatatacttatccatactataacatgagtggcaattattaggggaaaatattcttcaacttttttttttaaataaggaagcagtaaaggatgtttgctcatcttatgccaagaaatatacataggaggtgttctataaactttcataatttatacaaatgtttttggtttgtaaaatttagcaaatttcttctcagatattgaaaaggtcatttacagttttaagaatcttggttttaggccagttaaagaaatacatgtttttttcttttaagtacatgggaaaaataaacagtgactttacctgattctgtcagattttagctagacttaaagtattttggtacaagtttttgtttaggttctcatgtgcagttactgcaccttaaattacagacattttgccattgacaaagattgagaaggctcgtcattctacaatttcagttgctccgattccgcaaatactttagaaagagtttctacaactccaagtagactttcaaatgcttgatttttcaataaaacttaaaacataatattggaaagtgatatggaacctgtttaccaaatccagatggagcacgggaagctagaagccagtgagagggcaacccaggtaacttgcccttgggatagagaccttgttctctattctgccaagacttgacacacagtgcttcagaataaagctttcttctaattcttaagacctatacctatttctctctaatgtctaattaagatatagtattccagaaagtggaaataaaagatgatgtgttttacagaccaaacccacaggcacaagctagcttaaagaaaagtgaggagaaggggaggtgattaactttaagcaaaaataagaaaagcaaatcattttagttctcttaactaggtggtgtgcactccagcagtagtaaccccatgttgctaatatgatcatgtgacctagacactcaacaagtcagctcagaggcctgggttgtaccgagagcaattcccacaaatgagacacggtggtggaagaaggaagagaaagagtccaggctttttcattttgagaagaaaatgatagcctcccagtaaagggagtggtatgggttcaagtcccagctctgttgttccccatctatgggaatttacacaagacaaagagagaggtggctaagacacagcagggaagaactgattggggaaactgtattagaatcaaactacaaggacagagactgctcaagagaaaaaaaaattccttctctccccatcctgcaagaaaggattatgaataaaaagggcgattttgcatttatagcatttgtgcctccaggaggtccaatctatgaatctgtaaaagaagatgtcagatgttggagaaaattggagaggagaatccacagaagctgccagtacctgggtaacctgtgtgaaggacaggtcacttcctgatcacagctgagcctgcgttggttggagccaggactgtccctccccatagaatagccctgccaaggcaggggttcctacgcacccctcctactcattctctctcgggagatctggtttgcagacttttgcagacaaagaagccaatgtactgaaggaaagtttcagtgattttcccaaggtcatactacttaaaattagaaaaaacaaaacaaaacaaaaaaaaacccaccaatcccaaagtaatctgaggtcagattccccaggaaatggtgtggtgactgaacgatgccaatcagtctgataagaagattgagatggaatatgaggctggtgaaattcacaaagaaaaatattgagcatcaagggtgtagcagttcccactgttaccacctttaaatgacatgtttggtctgaaacaaggaatgccatcaaaattaataataacaccaactaatattctttgaacatttactgtaagcaggcaccagtctatcagctgtacctgccataacccatttaaatatacacatatttaaacaatagtaataaaggttcttggaaggcaactgcttccaaaacaaacctgattaacagcttcagtaatctgctttgataagcagggtgaggttagaaatactggagcctggcacagggcacagcgtgggccactgactggatttaatgctgtgttcatgcttgatgttaggttctggatcagggaaggggctggggctccaagtggttatagaggacactcagggagtcattgcccaccagttagaaagatttacaatctttctatagtggtacatccatagcaatctgtactggtcaaatagcagccctactgacaggtgtcaatcctgactcacccttcctttttcaggaaactttgccaagtgtcaccataatcttgcagcaaagcctcctatatgtttaacaaaatacaaagtgttcccccctgattatctctccctgcctggaaatgtgtggtgtgtcctctgtctggaagtaaccctgcttgctttcccagaatttgccaattcctgtgtgagaccctggccttttctgccaattgaggtggagtttaagagttgttattaaggacatgaagttttctctgtatcatgagaggatgatgcaaataactttgaactttccctgtacacccctcactcctatctgggctcaccctggggaggatttgtgttttttcaagaaagctgaacctaactgagcatgcataaaaagatcatatgaattaccacgtgcaaacatgaaaccatcttatcttaacaccttgttggcaaagaatctcctacaggtactggaacttttgtgggtaagtggaaggagtcaccgtatatcttatttgcaatctaacatcaagaagagtacattgtcatgatcttccaactgtgtgccttgaaacagagtcctgggaagagccctaatgtttagtgttaagaatctccaaatggctggctgggctcttgcttacttcaggcagttctttgcctctcttttgttcaggagtccattgattctttaaacggggaatccattgttaacatttttaatagtagtgttcaaaacaaaaagcgatctctggagcctgacagcagctactgagttgaccatctgtcctgtgcttgggcttctcaccctttcagtcccaggcaaggttactggttcttgtagctacagccacgttagccagtatcacccaccgtggtctccctgaggcagcctccaccagcactctcaccttagccctgccacctctgtcagttgtatcacctcagcagcagccactctcatcttttctgtccttgctgtcactgcatcccaactgtagtcactgtggttgggcaattgaggtgttaggcattcttgcaacaaggaagtggaaacatttgaccaaggaatccaactagctgtggggcataaaggataaggagaatggagggggcagtgttgagaatagagacatcaaagtactgtgcgtcgatattgaagtagcttagtgcgctgatgatcctgcagaggccaaacacacctcaggagagggacatggggaggccacggtgggattagggatgaagagacaggacttggcaatgagggagcagagtgtgacttggagctctccattttgatggctttcactttgtgactgaggacttttgcaactacacctgctgactttgtcaataaagataaagatttcagcctgcctgtggtgactgagcattcagttaatgctatatgttatgaatggaattgtctcccccaaaattcatatgttgaaatcataaccctcaggatgtgatcttatttagaaatagtatccttacagaggtaatcaagttcaaaggtctttggggtgggtattaattcaatgtgactagtgtgcttataaaaatggagaaatttggaggcaggcatgcacagagggagaatgccaagtaaggatgaaggcagagatgcttctacatgtcaaggaacaccagaaaaccaccagaatctaggggagaggcatggaacagattctttctcaccgtcctcagaagaaatcaaccttgccacaactttttcagacttctagcctgcagaactgtgaaacaatacatttctgttgtttaagcctcacactttatagtactttgttacagcagccctagcaaactaatacatcatcacaatctttccagcagaatctgcccaaagaaaattaacattctataaggaaattattaatcttgaaaaaaatgtatgctggtctccatcaacctctgttagataagagatagaaagtcttcattgtagcagaagaccctaaagaagatgaagtgaaaagaaaccaggtatttgcagagggacttgcctgaaggaatgaaaagaaggcaaaacttggagaggggaaaagtgtgaaagaaaagatgatccagaagcaatggttctcaaccttgactgagattcaaccttggttgatgttggattcacctggggaggtggttatggagaaggctttttataactcctgatactcatgcaatatcctacattaattacatcagaagctctgggtatgggacccagatatcagtattttgcaacggtccccaggggattccattgtgcagccaaggtagagaaccactgcctagagagttcctcatttttggtgaactgtgttgaaaaatgttatctggctcctaaatacagttctgaaccatgttctagagctcctgaaatattccagagtgaagtttcagatgttggtgagcctgcgagttttacagtggactttctgtttgaactgaatatttcacaaatgagatgttgagatacgcaataagataatcctcagacaattctggtctccttttctccagtggagcagacgtgccaggctgagtggtatgtgagcctacccaggagaaaagaaaagaatgctactacaaaaggaagctgtaaaaatgcacggggcagggaaatatttgaagagtgaacaaaccagcttctgttgattcttttttaagttattcttgcgagtggagacttcaatgccttcaaagctgtctttgctgcagattacacataggggcactttctcgatgactgtatagtgccataatcaatagctacttcataagagaagattacaaagataactgtgatacagaagctcaagatgctggtgatggcaaagcagaaaatgcagctcagaaaaacaggaggaataagaagaagaacaaacatctattcatacccagcagactgcaagtcataatgaatcagtttgtgtgaatctttggggaaaatcttgaatattatagactaaaatataattttccatggcttaaaatcttgtgcattcaatttttcttgtttaaaaaggattttcttaaaaaaataagttttaaaaaagcaaaccaatttattccactttgaattacaatcatgtactttgaactcagtctataggatgccgccaattctgtatatttattggcactataatttacatcttgtgaatggctttgtcatgtaggaataggactagagttgtgagttttatcagaattgtcatctgagatcactatttacttagaaaaaattgttcacaagaaccagttaaagtagtttctaggctagcttgcctttgctgtgcctttgtcatagaaatgcaacctctattctagcaaggagataaatctatttgattttgatgacttatcagtaataaaagtttaaaatttctagcaggaccacattttataatattagctgttggctggtttatatgacagaagtatacttaagattatctttttgtcacttgaggattaaaatatttatcacattatttaaaaaaaaaacagatccagtgccatccctttatacagttggtctaggaaagagagctggcatctgcttcacaggccaggcgggccacattttgtacaaggggaaaaggtaagtggctggcttggtggagctatgtaacaatgaccatcatagatacaacaataatctcttacctagtgttacacacctaacgttaaaactaataccagaaattataataaagttacaatctaccttagagagaaagaatactcactggctttttatcctcaagagatactgtgtctcctgtggctttctgaaaaaacacaaactaaaaaaaaaaaaaaatgatacagagatggagagcatgagaaccagccaacctgagttcttattccacagcttcactctctcagcagctgaccttgggcttagtcagcttctccctgtctccattttcacatctataaaatgaaggtaagactatatgttctgcttacctacagaactatttagaaaattgaaataatgaatgtgaaacactcagagcagtaaataaatactaggcaaatgtaaggagttatagaacccttgtttactttattcctgtagcaaatgccccctttcaaatgtagtttattcttttaatcagttttcctgcttctcgcttctacatttgacttccatttatttctcctgcttttatttacttggcttccatttatttctcctgcttttatttatttttgttttccccatttcctcacctagtggctttaaaaaatacatctttttagattgtttgcacttttatcaaagcttttgattctttttctggaaggtgacataaatataaataatggtataataaactcagtcccagttatctcaggtaaaagatgtattctccatgcaccatcatcttacccctgaccaccatcttgcagggtgggtattttttccaaccgtaggctgcagctagtgctgatgcaaccaaacaatttgtttgccttctaccggcaggagtcaggatccctgggttaaaatctggcctgcacctctagcaagctgtgtgaacttctgcaagttcatttttaaaaataaatcttaatttgagtcccaccgatctagacatcaaggaggcaatgacaaaccagcaccctaccaagtcagctttacaatccccacatcggcaacacctgggcaatgcaccatgtcctcctcctagaggttggggagggctgagtgatgtgtgtgtaaaacaccaagcacagtcgggagccgcagggagcactcagtaactgtcagcagttccaggttagcccctgagcagacagtcctcgtcagacaacctgagacccgggaaccaagaggccgaccaatccctgcaggatttcatccataacctcttccttctacctggatctaacttcctgaatgaccagcgaagttttgcaagttgggcacaaacctagcggaataaatggggctttgggctgaaatgggaaccgatgaaatgaatgttttcttttgaacactcatgaaaaacaaggagtctcaatttctttaaatgtccacataatacaacctgactgcattttattccagtgaaagaatctattgtttctatgcatggtaaacagccagaaagtaggagtttcctgttaattcttatcacttttcagaagcagcttctccactgatgtatctcctgcaccccatcagtactaaaagcaacctgctccttagagacacaggctccagcaaagacaggagaagaatcgagaggctccagggagaagccgaagtgaaatggatgtggagccagctgtgcagggaccagtgcaagcctcagaatgcagcagaggctacttggaaacaatttgctgatcttcaacaatctttttctttaaaatgcatttaattcattcaaatgctggaaacaatgccagtagccgacaacagaagcagagtggaatgaattatgcagcattctatcagtgaaatattatgcatctgtccagaatcatagttatgttttaaaaaacatttaaactggaaatgtctcattacgtaatgagaagtttgaaaaacacagtgcacagaagcataccaccataagatgcaagtccaaaattagtgatgaactaacagcagcaacaacaaaaggcatatatacattttgtttgaaagctttaaaggaaatatactaacagtgtgtaacataggggtactggttttatttccttctgcagattttcatgtactttataattttctttagtgaatattactttcatcatgttaacgaataaaagttacaaaatagatgatcagcttttgatggaattcaatcctgatttttttaaactctgttcctttgcaacgttatattgtgttggtaaaaaaggtaaggcccagtttagtcctggagaggatcccaagagttatttatgtggccctccttctgcctcaggcagctacactattatcatcactattctacaaaagttgcacctgagagagagtaaggcacttgcccaaggtcatacaagcaacaaatagcagactagtagactaggactcagattttcttactatgatgatagtgttctatgctatgttatgttatgttatgttatgttagtattttcgacaacttactaaagctaaaatttatattctccctgggctaatgcaatattgaaaaggagaaaattgcaagtcttttgacatttcattaaaatggacagttcaatgtcagtattacaaagaatactagatcctgaatttccaggcccctggacacccactgtgatttcatgtctccttgctctatgccattctttggtttgcgatcccaagctggttcagctgcatcttagcccccggcctgacctggccccaggagggcatttagaacacaggcaccggggtggtccaggctgcaactgctccgctgctcatctctcatgttgagaaggttccctcagccaccttgtccaaatatctctgctcaaatgttgccttctcaaggaggctgcctggattatccagcttccaggagctttctcccctccccatattctctccccactttcctgttcgatcgttctccaagcataaagatgctgtatatttgcctggtttgtattctccgtcttggccaactagaacacattgcttccagggacaggggacgtgttctgtcttgttcactgatacatcctcgtgcctagaatggggcctggcacatagcagttgctcagtaggtatttattgaagtgaaggaaggaggaaggtatgggtaggattcccccgccttacctccattaccccagcaataaatagcagcatgtcatcatcacggctcactgctcaccgttgccatcctagagccacttccaggaaactgctgagccttcccagaaggcttggaaggtgcgtccttcctgcccttctctaagtctgtgctttcctagtttaagttctgagaaaccaggccaaactagcacactacagcagtggcatgtgaacatgcaggcacgtagatactgtatttgcaggccgatgtcagctgagtgcctttagagtttctgaagggaaagctgcctgcctttcacagaagcccatttgaaactgggtcttaataaaacaatttactactcaccacagtatgtgaatattcagtgtggtagagtgccacctctaataagcttttgttctgatccaagttatccaaaatgctaatattagtggttgaaacgtccaagactcaggtcgctttattatttatacaattcaacttctcaatacttactataataaaaataccccaaatcccttgcacacatatctccagtagttttatatcaactccacgggaagttagagacaatagttcttaacaataacaattaggaacagcacctatcattaatgttccaggctttctcctgggcggtcttcagacatcttttttttgttgttttgtttttttttgttttggagatggagtcttgctcagttccccaggctcgagtgcagtggcacaatctcagctcactgcaagctccgcctcccgggttcacgccattctcctgcctcagcctcccgagtagctgggactacaggtgcctgccaccacgcccggctaatttttttttttgtatttttagtagagatggagtttcactgtgttagccaggatggtcttgatctcctgacctcatgatctgcctgccttggcctcccaaagtgctgggatttattcttgattatttacagcaaccctgtgagctacatgtctattcctacataagacagcaaagttgccgagagctgaaacagtacagctaggagaaactgcaatcagcctctgctctggcttcaaagctcagtccatttcacagcaggggggtttctgagtggaggattcagctgctccattgtatgatgagacaatattgtggagtatttgtctatggtctttctcccacctccctctgtcccccatcacttcccagaacaatggcactagaaggtaaaaaaggtcatgttattgatattttagtcaaaagatgtaaactagggaatatctggaagaagctgtaccccattagaagtcctctgaagtctcaaggggacagaagtgaagcaggaggttactggtgggtctctgatgcccagaggacaacagaatgctcagataatttgggggactgtgggatctgaagaaagagatttacatccctcccatcctctggatggtgagaggagagagggctgggtggcttgtcaaagacaaaaggctaaaggtagcccctggagtggctcatctccccaaaagggttgcagaagttagaggagagagaaggaagatgtgtaagcaagggagctggagataatgctgaacaaagcagtgaggaccctgcaacctgagaccagatagagccactgacacctcagcaagtaccagggtggagggatgaccatgtctgaggatgcaacaaaactagcatctatctcagaggacagcaacgtgaaggaagccaacatgcagcaaccagcattctcctctgccaagggccacaacgtactttatgcttttaggcacaaggaggaaagggaacatgtggatttaccaagaataaacctgaaatggttgggactcattttgacttgtcattctatagtgtgcctctagctgaatgggatttccaaggaaaggttaagttatgggaaaatattcacttttggtctgtgagatgtatcagctacagttatttttgtctgtgtcataccctctctccttctatgccttttttttcctacgttggctaaatttggctgaatttactttacaacttaatattgggactgtcagaaaagctcaaaatctctgtcataaagatatctattgagaagtcctcttggtcgtataatgtataaatctcctatatatgcctaattttattttccaaggaacccgctaaagtaagcagagcagatagtattatctcactttttagatgaggaaactaaggctcagtgaagcttagtggattgccccaaatcacaatggagggaacaagatgcaggcccttcaaacccaagccccaactctcacccctcttctacttcacccatgaccctgtttttgcgatcgtgaccaagtgtggacctttccaatctttgatattccacacacaggagaagccaggaagccattcctgctggatgtagtgaccaacacattggatttacccaaattgccaagtgatcctgataaacaaaattagagtattcagattggaaaaatatttttttgcaactcctcctcacaacccggaacccactgggtctaaaaaaccttgtattttcatttcattcacaggaatatggagttagacatatgctagagaaggtgggttcctctattagaagactaagaattatttgagattatgggatagtttgttatataaaacaataatctaagtcaagagaaaaatatgtgttagggaagtaataatttgtagaacgtcagatatccctgtgtactgcaaagttcaattcaacaaagatttaagtagaaaggcatcacgctaagcctgccataagtaagcaatattataagtgaggctataaacaatataaagagaagttttgccctcaaagtttacaagataatggaaggaatcagactaaaaccctagtaatgacgatcaaggcagaatttattaagagtgattaagaatgtattaaggtattaattacaatcaaggcagaatataaaagccgtgccaagtggacgtcgtagaattagagaagggtgcaaacacatgtagttgggaaagaagaggaagacttcaagaaaggaggaggggcagtgtgtgggcattgaaagacgagtagaatttcagcagcgtctactgggaacagccacatgcaaaaagaagtgatgccctccatgagatccagggctcctggtgacctctttccccaggacagaagggtcaggagggccccagctgcttagccaggtactagcacatggtttgacttttcttctctatgattttaacttccaactattccatggaatgcctctcacaggtagaatcaccctttctcccatatcaaatacacacaatatgccaaagcaaatgagtctgctggtctgagtgcctgccaatccaagcctgagaagagggtaagctgcactgacccacctccagcaggggaacttggagagtatataaagctgaaactccaggttttgctgtagctagaagctctcccaacatgggctgccaagccctcccgctttggctgctgttcttccatgccgttattctacctgaagcaggtactacagctgatgcacaggttcatttttctcatgccttgtcacaagcttgaaaggcaaagtatggttatttgcacataggccaccagcacaacagcttaaaattaaatgcagatagagcttttactccgcttaatgtaatccagccactgatgagacattgctgtgattatagctgaatgcataatcataactaattttaggaaagtttgattgaatattttctgtaagatttgttttctgtgagcaaagcattagccaatttattgctctttaaaatcatacctctattgtgagattctggatagaaatagacaaagaaagaatacttggctatggtataatccaatacgggttcttaaaatgttctttggcttatgtattgatattcagcactaggagtattgaatgacagtcatgattttttttattgttgctgaatggaggtataaaacctactattaaaaaatcttagcttgaaatacttgacatgacataaaattatctgggcttgattcatgatgccttctaatctgaaaaactgtacctttctataaaaatagatagattgatttgatattattgcttttaatgtgtattctacatctagtcctcttaaggaaattttaaatttaacttggaactaaactaatttaaaatatctacataacttcaattatttttatcattattttgtgactttgggggaaaacattactgtcttacttgtactaacaaacgaaaatttggaaatacccttgaccagcaagtagtttgaatataattcttattaactataaaggaaaaacataactcacccaccacacaatagcaattgactttaaagtttgtaatatgctcaaactctttttttttgttctgcacgtaattgtatgagtatgtttatacccaacatttaaacatttattaaaacatactaggttgttaggaaggatttcaataattttttttaatcttttgagtttctaagccttgtttcttatccatttgtccaatgaagtttcggcttgggaatatggggtttagggcagaaagatctggaacattcaagtgctaactgggcactttttggcccagtgaacttggacaagtttttaaatctctctgtgctgctatttctctcaagtaaaaagaatataattcacaggattgtttgggggatttaatgaaatgtttgtaaaatacttggaagactgcttcaggcatagaaaatgttcagtcaatgttaactgttattatagacactgtaaattataaactatagatattttaaacggagaagagatgaaaatacagattatcagattcagaatatgacattttaccatgatacatcaattcctcgggaaaccaagatattttcccctttcgacgtttcagtaacaggttttgagtaatggattcaatattttaaaaacatatagcaggaaagaagttcttgtcttccagtagatcaacactatgcaggttagtacttggggatgtgtgggctataccaaacatgtatggaaattgatcgttttctgaagcatagcaaaaatttggaaatttctgagagaattcaaaattcacattcatcatatttgtgccacttgtggcaaagatgattctagtttgatggtgctcagagtgacaaagtgtcagctttggggatgtaattgtaggccatgggagaaagtgaccctggaccaattcagaatgaacctcggtcatctctgccccgctctcccaggctccttcccttacctgaaatgtattgctactcttgggaagtggaatcagtctatgatttaatttctttggaatcaagttcccagaggattttagacagacggaaggacccaaaatagacaattctcaatctgcaatgagtttaatgatttctgggagccggaaagaaaaccacccccaaattcagtgtttctcttaaggctacaccctgataactactaatctattgggaacagcagagaaagggtcccttgaagcaaacatcagcctcattctggtcccagctgtcccgaatcccttctccctcacatcactgtgaaaatccaattcccaatggaaaaagggtccaaatgaggactgctattacactgggcactttcataatccagttccaacaatattcagctctcctcttccctgccttattctgctttctttgaaatttgcaagcttaccaccaaataccagagcatttcccaggctgagggcacatgctgctctgctctgggcccattacttagcacagtggttggcagagtagagaacgctccatcactagtttgaaaaaatgaacaaaacacaatgagcgagaacatcacaccgttagctgatctccacttgtgagatccttttcaaaataacaacaacaggattatgaggctttttcccccgagtggctgcaaatctagggatatttgagaggctcaggtaatcttacagacaccattggcaagtctcagttatcagtggggccattttcttgccagcttcctggtgcctccttcatctttgccccttttccaacccttttgtgcccacctgtactgtcactgcacctctcccccaagatgcggacattgccccagagtttatggagggggtgctcttcagcttccaggaactcatggattagtgatacgatatgacccaataggcttttctaggctcctggtgctgattgcacaagagtcttacagacaatggggccagtgagaccatctggaaacaaccacccagggacaccactgcagttccatgcaggtcactttgatactagaagagatttgtggaactggcagactattggagtgcagttgatattagggtgattcacatgaaaagtgaggacaaagggggaacttgttgaccaccagagagagaaagacaatttctgataacgcaattgttccctggcacagaatttatctaatcaacacaatcctagtgaaatcattaaaaagtctctataaaccccattatgatcaatttacaatccattcagctgtgtgcactgctctgcctggaccccacactgaccacaacccctccttttctcacccccacagaccccacccaggctctcagccctgccgctgcctcctcagacagggactcccagccctggcaccaaggtcagctggaaattccaggtgtcagatcacagctggatctgcagaactgccctgtgatcccaagcacctctggccaaatgctcagcagaaagcacaccgcctagccctgttgcaaggcctgcagccctgagagccactctgtacacatgcacactcacacccaccactcacattcgttcacatacacacactcacacaaatacaccttcactcacacccaccactcacattcattcacatacacacacaccattcactcacactcacacccaccactcacattcattcacatacacacacaccactcactcacactcacacccaccactcacattcattcacgcacacaccactcacactcacactcaccactcacattcattcacatacacacacaccacacacaccactcacattcattcacatacacacaccactcaatcacacacccaccactcacacactcaccactcttaattacatacacacaccacacactcacaccaattatattctttcatatacacacacaccactcacacttacaccccaccattaatttttatttacattcacaccatttaacacacacttcaacctacaaattaaatttatttacaaacaccaattacactaacacctaccaattattttttttacaaatggcccaatttcacttaaccattgacatttatttacatttcccaccacccctttaacaatttaccatttaaattttttgtaattaaccacaaaccagtgtaagtttacccctgnnnnnnnnnnnnnnnnnnnnnnnnnnnnnnnnnnnnnnnnnnnnnnnnnnnnnnnnnnnnnnnnnnnnnnnnnnnnnnnnnnnnnnnnnnnnnnnnnnnnnnnnnnnnnnnnnnnnnnnnnnnnnnnnnnnnnnnnnnnnnnaccactcacactcacactcaccactcacattcattcacatacacacacaccactcacacactcaccactcacattcattcacatacacacacaccactcacattcgcacccaccactcacattcattcacacacacagcactcacactcacacctaccactcacattcacacacaccactcacacactcaccactcacattcattcacatacacacaccactcactcacactcacacccaccactcacattcattcacatacacatacaccattcacacacactcacacacatcactcacatttattcgcacgcacacacacacactgtctttcataccactcacattcattcacatacacacacacccatcacactcaccagtcacattcattcacatacacacttacactcaccactcacacacactcaccactcacattcattcacatacactctcacacatttattcacaatgtctcacacacacacacacactcaccacatacgaccaacctgtttcattcactccgcctccttgatcctatcccaaagccctgccctcctcagcccctgccctcagtgctgccctctcctgactgagctaccagttatctccttgcctagtcttaaatcttccctaattcctggctccttatctcttattgtaaatattcccctgaacactacaaaacagaccaaacgctccctcagaccacctgcccagcacccgacaccacctccctacctgaggccaccctggacattccgcagggtgcactgcagcagcctgggagggagagtgacttcagccctgggggatacatgggcagtgtgtctgcatctcagcttactccagattgagaagaggttgactttctacatcaaagaccaggagttgggtttcagtcaccctgccaagcccctcatggaaattccgcttgcttcacatccaagatttctagcggagttggtcctgacttcttattctcaccccttacttcctaacccagtcaccctggtttcacttcaactcctttctgaagctgctctttttttttgagactgagtcttgctctgtcacccaggctggagtgcagtggtgcgatctcggctcactgtaagttctgcctcccaggttcacgtcattctcctgcctcagcctcccgagtagctgggactacatgcgcccaccaccacgcctggctaatttttttgtatttttagtggagatggggtttcaccatgttagccaggatggtctcaatttcctgacctcgtgatccgcctgtctcggcctcccaaagtgctgggattacaggtgtgagccatcacacccagcctgaagctgctctttttaagacacaatggtactggcctttgattgccaatccagtggcatcagcagcctctgtcttgtcagctcccccacagcaggccacactgacagctgtccctgtgcccagaccctcactctcccttggccctgtggcagtgacaatggtcagatgaaagctcttgtatctaaccagaaagagttggaaaccagtttttaaaagtggttatgtttatgctgtgtttatgtgcactagccaaatacctcctctctcaccaaagttacctctaaagcacaaatccaaaaatgtaaaattaattaattttacttaaataaccccccaaaagaaaaaaatacataataaaaataaaaacaggaaaaaacacaaaaagggaaaaatgcctgaaaaaggacaaacccatgcgatattagaacacatcaaatgaactaaaaagcatggttgaatttatgtgtaaattgtagcttacttaaagcaaatgccatgattaagtacagatagctaaagatgtgtaataaagtatacaggctgacataaaattggaaaaactggtacaaacatatacttgattaaaaggaagagtcataaaaccaactacacaccaaggcaagatcttaagaagaagtgattgcaggacatgggtttccaagctcagctgcacaacagaatcccgtggactgtcgaccattcagattcccaggccccctctgctgcagctgtgagccagtgggtttggggtggggcccgtgaggccactgtcttaggccacactcaggatccctgctgggttgtaacgtgtctgatgcatctcagtttgctacaggaaaaatgtgggaggatccagaggaaggctgtggaacccatgctctgagagaagcactgtccaaggtacacctgcgactcagcaagaaggtgagtcacagccagacattccccttggccttgaggaggaggggccgcgggcaggtgggacctgaagggcagagggtgtgactgtccccaggaatggacagtccccacccagccaggcaagtcacacatctccacaaagaatgacatcccagttttatttctgcttaacaagacaaggatgccctcagatctttgtttaacttcatggttcttatacattaaagactgactttggccgggcatcatggctcacatctgtaatcccaacactttggtaggccgaggctggcgaatcacttgaggtcaggagttcaagaccagcctggccaacatggtgaaaccccatctctactaaaaatacaagaaaaaaaaaatttgcctggtgtggtggtgcgtgcttataatcccagctacttgagagtctcaggaaggaaaatcacttgaaccccggaaggagaggttgcaatgagccgagattgcgccactacactccagcctgggtgacagagtgagactctgtctcaaaaacaaacaaacaaacaaacaaaaatacctgacttaagggtctctatttcaggagttcttaaatgatggatgtatgataaccaccccaagagcttattgaacatgcaaaatcctggcccccattcccagacatgggatgcactccaggaatctgcataattagcaagccctcctagagattcaaatgtctctgcagcttgtgtgagggtcacactttgagaagcactgccctgtggccactgggaagggagagacagcaggagatccaccagtcccctgctgtccctcagcagtaagccttgggcatttgcttctgtctcccttattactggctcttaacatgaaggtaataaaaattgccagctccaaagtgttccctctgtgccaggcattttacctgtatttgtttcatgaatcccctttgaggcaggtacagtgatctctgacagatgaggaaagtgagggctcaagtggcccatgcgaattgcatagctagcatgtgggagagctgagacgcaaacccagaggccggctgtggcactcacactctgaagcccgaccatcctaggtgcctcgctatccccggagactcctgtgggtagccagttggatcatgcccatcaaagtactaagagaggggaactgcaggtgccaggtgacaggagagggcagcagcatctttggaaaaaaaaaatacaatgctagtatctgctgtgcacttgcacttcacccacactcaacactcaacactgacaatgacatggtagaaattatccaagaatccaagagagactttctaagctgaaatatcaagaagcccagagcccgagggcttctatcttcttaggtgcagatattcttgccagggtgggcacttctaaaaagagcaaagccaagcctgacatctcatcacagggcaaacctaacatggtcccatggatgaccccacccagaacaggagggccctaggagatccgacagtgttccccttctgccccctaactaacagcatgaccttcggcaagctgctgccattgtcagtatcctatctcctccctggtaacatggggacaataacaccctacaagggagtcgtgagccttaaaaagatgtcagctctacagggctgagcccagtgccaggagcacagatggtgctcagtaaatagcagttgttactgcgaccatgaggagatggtggggaagatgactcccttcaccaacacttaagtgggggttggggggctgcctttcttccaaagactggattgctgtgcaactcgtggaaggttctggaaggtgttcaggacgagtcgaggtgtattttgaaggcgtgtggggcatggtgtgcgatgacctgtgggatgagaaggaagtgcaggtggtgtgccggcagctgggctgtggggcagccatctctgcccctggagaggcccactttggccagggctccggccccattcttctggacgatgtgcagtgttccgggattgaggactacctggaggagtgctcccatgctggctggtccacccacaactgtgggcacggggaagacgctggtgtcatctgctcaggtaaatttctatcttttctgaaagttgatttttcatttttttctgatcaatccctgaggctcctcgtttctccctgacatgagagaatgcctttgtaacatatcatttcattagtatgaaactccctgtccacccaggtcctcaaccattcttcccaagaaagacactcactctgaagctgactcctctatgatatttataaaacagctgaacactctaactctaaccccaatcgtctgtgtctatttgagaagtcaaagataatcatatcgggaagaatgctagatttgaaatgaaaaggcttagtccagctgcaggaaaggtacatggtttgtggatcctgatacaaaacaaaaatgtgggcccccttttcaaaaagtgttaagaatttcaagacagagacagcagagcgtcaatggaagggcagggcccatgggacctggttgaggcttaccccaatgaatattcctctatgattccctctccccaaacctcctgcccccttgagtttaacgtggcattttgcacatcattttctccttacctaacaagttgagaatgatcatcacgacaatcatgacaatgccttttactgtactgctgtgaggacgaggcgtctgtcagttctgatccactgtcttgtcattccacagcctgaaaagcaggctgcccacaaggctgtgttgatacttctgctttttgaggaaatcaaccctctagagagtgagcagctgtgtctctgataaaccgactatgggtgatggggcaaggtgtagaatcaggaggagggggaacaggaaggctcctccttgctgctcagctgcagacaatcgtggagtcagagggggtgtctttctctcccctactcccctgccaattcctcccaaacccaacatgctaggaagcaggattagctccatcaccaagtggccaggagctaagcattcaacaatatttactgccaaaggctgtagagatgcagcagtgaatacaacgtccccattccgtgggatggacttataggtgactgccagctagcaggtacctcgcctctcctgccgactgcaaagacaagggcctgttgtggctgggacctttcccactgcaggcagcttcatctcgacagcagttaaggggtcagaggagaactccagtccattaaaccatcattcccaaggcctctcaccagcctgcagggcaaaggtggccccaggccctcctacctcctagaccactaggtcctgccttatgattgaaccaagtgggacactgtccaaagcccttcaggtgagtcctcagcaggcctgtgtggaatttacctttgcctcatgggggtgctccaggccgcctgggtgggcagaaagaggactctgccactctcttgggcagcaagtcctgcaccaggccccttgggagggaaggtgggagacaggggctgagaacaatctagttagcaaagtattgtaagtataaatcttgcttcaggcaatttaaaaacactttccatgattttgccctccaggggatatttggcaatgtctggagacattcttgattgttacaactaaggtgctactagcctgtgtgggcaaaagccagagatgctactaaatatcctgcaatgcacaggacagttcccaccgcagaactttccagcccaaatgtcaatagtgtgaggttaagaaaccctgcttcagaatcaagcatgtgcagttgaatttactgattgtaataactatttattaattaactgatcattgattaattaacagttgcatcagtaatgaaagcaaagttatctattgtttcttccccaagcgttagccttagtctagtttcttttccagtcatttcctctgattgtcccctctactgattacagttaattaaatgtatcctgtcatttttgagggggataatctcatcccaagtgaatcttgagcagattcactgaatcattattgtagccttcacaggtcatgtgctccaagcatgacaggtctccgagtggtgtcgcctaagagactgtctcaaagcataaccctgatgtcagccactgagcactgtcgtgtttcctgagtacctcctgttcattatcccattccacccttacagcaattcggggggcttgttttatgagccttgcattgcaaatagggaaactggggttcagagacaaggttaagcaaggtcaaagttaaatgccttgaccaaagtcccacagcaaatatttaggtctctggattccaaatccagtcctcagtctcctgcgccaaatgtcgacactctggaaaaattgccctgcacctaggcaaaaatgttcaaatgttcagagttgtctttgatgctctgccagtagcctcaccctccttacctacgtcaggcctccgcaacacactcacaccccctaaatcctgtcaagctccccaggtgcagggaacctctgtgctgaactgccctaatttacttaaacaggagctgggacccaccttcttccatccttgaggatcacacttcccccagttccatttccttaagtgctcttcccctccacctccagtgatgttgagagaaagtcaatgaatgttaattggggaaataagtaattaactacgtgagtgagaggactggatgtgaatgcattagtcagttctgctgtttttcaaatacccccaaacagcatggcccaggtttccatgccctaagcagactctctttgaaatcctttacttactttaaaaagtcacccagttttacttacaagttacaattaagccatatttattttaatacaaaaacaaagttgtaaacactcaacaacatcaggtaccctcagtcccttaggaagatgcacctatttatcctgtggggtcttctaccccatctcatggtgagaaactaagaaacccaaccctagttgcagatagtgggctcttcctgagtggagtttacactaaaatgtgtgcatttcaatgaatactgaaaagagtcaaaagatctttccttcccagatatgccctaagcctttttgaagtaatcacatataaggaaaattccaggctgaagtttttgactggggtcttagtaatggggcaacagcagatccttctagcaagtacagggcattccagaatttttatcatctctaatagactcagtttacatttaactttctttttttctcatagagtatgaaaatgagcgcttgcaatcttttggtaagaatcacactttactatgtctttaacagaatgtccactaatgcccctaatcctttgattgtatttaccagcataatgccttacaagaggttggggagtggcagaaaaaaacaaaacaaaactgaatttaatcaaaaagactcaacaaggaaagagaaaaaacaggtagcttccttgcctttaaccatgcagaaatctttgctccccaaactgttgtctaaatgtattttagaaaatcctggagtgaggacatgaatatggtttagtaaattatcatgcaaaaatgttattaaactcagactaaagaaaatcctaactttggacacccaaataatgcctctaaggttggaaaggcagtgactatggcctcagaacagagtccctttccatctctgtttggcaaattcagagattaatgagaaaagcacagcctttattgttaacctgagtccttcagcattctcctttatgagtgcctcaggaatatagttccataagtattttatctttctggcagaagatgcatttgcacaaataatccaatttaaaagatcaatctgtacatgactcagatgcacaataaatttctcacttgtcactgatcagaacctactggatttatttctcaaagcatgccattagctcaacatctgctcctggaatcacatacatgctgacgcttgcccagtaaacttgggtagactattttgcatgacaatgatacctcatttatttctctctgctcttagatgctgagatcctaacgccatttcctggtggtaagtcaagattttctaacttcctggctgatacatcttggtgggtcatttgctgctaaagtgatggttgtatctccaaccctacaaacactaccaaacagaatggtttcatctcaggatcccagtgctttcgcttcactcataaatctctacaggtttttttgttttttgttttgtgttaatgcacagaataaggctctgtccttctccccatccttctttgtctatgtaacttcttcctactcctctttcaagcctcagatccattgtcatctcttagggaagacatccccaaatcccaccccactccattatatactctcaaaacatcaagagattatactgcttcctagcacttggcatagttgcaaatctccgtgtaattttagattaacatgactgcctcctccagacttgcaaactagactccaaactctgtgacagccagagttggatctgttagtttaaccacagtatccacagtgctatctattcggccctggtgtgtgctcaataaatgcttgttgcaaggtgaaacaaatgggttaatgaagaatatgtgccttctgctaacatgcagtatttttgtatttccccaaaagactggccacaattgcaactagtgaatggctcaggtaggtgttcggggcatgtggaagttttccaccatggccagtggggcagggtttgcgacgaccagcgggacatgaatgaagctgacgtggtgtgccggcagctgcactgtgggtgtgccctcgcagcccctgctgaggcccaatttggcgaaggcagaggcgaatttctactggatgatgtggactgtactgggaaagagagttttttgggacaatgtcctcatgccggctggggcctgcataactgtggccccagagaagatgccagcatcatctgcgcaggtaatggccacctctccctccacaatgccgctcactacatctccactcaccccactggcagtgcttccacctatgtaattgaccatctgccacttgggtgagccaaaagtaaaggcacagtggtaatttgagaacttcaacttgagctcaggaatttattagccacaagatgttgaaatggatttttcacagagaaaaatagtggaagatattggtggttccatgtcaaagcctagatgtcaaaatgaatggtgaaagacaacaggagtcaacagtgatgtgactcactttctgggtgtgttctttctttcttcaggtcactgtggtgaactaagagacaaaggtttttcccactaaaaatttgcagtcaactgagggtgacaaaacaaggagtttgtaaattagaatagcaatagcttgtcttgattgggagctcaggccatgactgccaatcacaagtctttaaccaaatagtcatcatcatgatcagtctaggacagggtttagatcactctctgttgtaggtggactgtcctgtgcattgtaggctattttgcagtatccctgacctctacccactaataacagtagcactcctactcctgacactattgctaagtgtcctttgggggagtaaattgtccctgagaaccactggtctggatatacaaacaaatttccaccaaacatgtggctaatttagcatactaccagtgctaacggcataaatttatgtgccagtggggaaaaaagcaaatatatatattttttttttgagatggagtctccctctgtcacccaggctggagtgcagtggcgcgatctcggctcactgcaaggtctgcctcctgggttcacaccattctcctgcctcagcctcctgagtagctcggactacaggcgcccgccaccacgccaggctaattttttgtatttttagtagagacggggtttcaccatgttagccaggatggtcttgatctcctcacctcgtgatctgcccacctcggcctcccaaagtgctgggatcacaggcgtgagccactgcacccagccaaaaagcaaataatttagcaggtctgaccaagcagtaaacttgtcacttgccaacatttctaattgtattaaaccagaaagactttatctaattgatactaatgtcattaactagcctcttaagtccattcaaacagctcaaatagtgtgtgtatgtgtatgtgtgtgtgtgtgtgtgtgtgcgcgtgtgtgtgtgtaagttttggtttgttttttcatttagctttagttttttttttccatcttttttatttttaaaaattatttggagttttggcatagaattccatcaaagcaatctagtctataaagctactgcgttccacctaacagtttcgtgtgtataattagtgttctctcctctttggaggcattatagggtttgcacagtggacacagtagagccacagttgaattgaatatgtgttattagacacactatgctaaaaaattaatacatttcatggttaattaaagtcacctgaactaaggcagggagggtcaatgcttttatttcttcttcattttaaaattaatgtttatttaaagcatctctagaggcagcaacccttttctaaggtagatcttttcctgtatgttaacagaggctgagtacttaaagcccacatcaggtaagttcatgcttttgttttaccaacttgacatttttttattctagaagctacctgggcaggtaatagacagataataaagagacaaatggaataaaaggtgggagggatcagcttgccatattttgacagtcattattttttatttctgcattcctgggccattaagataatcctttcattaagttgaaaatgtcattggactgctttctttgttccgcaagaatgagctttattttcacttcagtcatgagggttttggttattctctagcattgctattttcatttttccagtggaatagcagttaaaagcatgattcctatcaccaagatttttaaggaaaaagcttggtaaattgtgtttctttcgttaccgtttagcatatgttctttcctgtcatgtggggctcagtgtggctggggaagggaagtccctgcctgtacttcactcttatgttctaatgccaccaaattcccaacctgtctccctgcagagaatgctgaagactcactgcaaatgccctaaggtaggaggtattttcttttttctttttctttctttttctttttatttatttatttatttattttattattattatacttcaagttttagggtacatgtgcacaacgtgcaggtttgttacatatgtatacatgtgccatgttggtgtgctgcacccattaactagtcatttagcattaggggtagtaggtattttcatgctgcatttgcagttagtccttacttggtacagttttcttttggtttaaaaaccaaaaaattttcattgcacctgctcagctgaatttggagaggagaatacactacatattctatgcataccatatttggatcaatttcctagtatgtaaggaaactgatgtgtcctacaactagaaaatgcaacgggagcatgttcaagacaggcttgtgcactagccaaggctgagcttggagatgagggaaaggcatgggtttggcagcagaagttctgagtgtaagttccatctcagccacttatttagtgtaaccttgggcaactcactaacacctttataaaggggggataaaaacaccaactttgcagtgctccatctaagttaaacgagatcatatagatggaatggtaactagagccaacttttatagagtgtttaccatgtcccaggtacttttctaaggacttttcctgcataattacccattatttaataagttatttaattaataagttaaatagttaaataatgggtaattacacaggtaagtcccttaaggactggcaaactttttctgtaaagggccacatagcaaatattttaggcttcagaggccaggtggtctcgttgcatttattagactctgcttcggtggcatgaaagcggccacagacaattcataaactcatgaacatgtctatgttttagtaacatttcatttgcaaaaacaggcactcagctagggttgaaccacaggccctagtttcctgaaccttgctctaataaattaattaattctaaacactgcatgaatgacatttagtttttacaatgacctgatgaggtaggtatgactgtaatccctattttactgaggatgaaactgaagcatagaaaaattaatcaacttttattatgataccttgcttgacttttacggagagttgatgttaaaaatagatatatttctcctgtttagtttctcaaatcatgaaaaatatagagccaaatcttattcctcctctctctactcacttcacccaaccaatgcatcagaaaattctgtctacttctaaaatatatgctaaacccattagcatctcccaactccactaatactgcagtcatccaaagccccatcattgttcatcgtcactatagcaacaattttccaaatagtcctctacctcctccctttcctcccccaacatatacacaatctattctcatcacagaaactagagcaggctggtaattgtaaattagatcattccttttcactcaaaattctccaaaagctttccgttgtatttaaaataacatccaaatctggtaccatggtctttcagaccctgcatgacctatgccttgctcatgtctctgatccttgagaacacacctcttgcactgtgttccccgagtcttttttccatcccttcaaactcacaaggtagcttccaccttagggcctttgtagggggtacttccctctgcctgaaatgctcttctcccagacttttcttcagctcattcctcgtaatcaggcctcaggtaaaatgtcagtccctcagagaggtttcccctgaatacacaatccagaaagacttcctctcaatcacattctatttgatcagcctgttgtttttctcttcatagtactcacaccattcaagatagcctcttttttttcttatttttttctgaaatggagtcttgctctgtcacccaggctggagtgcagtggtgccatctctgctcactgcaacctccaattctcaggttcaagcaattctcctgcctcagcctcccgagtagctggaattacaggcgtgtgccaccacacctggctaattttttgtagttttagtagagatgggtttccccatgttggccaggctggtctttgaactcctgagctcaagtgatctgcccacctcagcctcccaaagtgctaggattacaggcatgagccaccacagccagcccaagatagtctttgtactcttttgtcgttgtcctgctcatctgtgtcctcctgcaccactccccagagtgtgggttttgtgagagtaggaactttggcaatcttgtttatctcagagccaaggagagttcctgatacataataggttctaaataaatatttgagtgaaaaaatagacatatataacattctgccacttccataaattgctgttgaaaacattatactaggtattaaaatactcaatgaacaaagacaatgacttttttaggaggataccacttatcaggcagtgagaattccattatgcaccaggattttcatctgccttcaaactccaggaagttcagagcttaattgaatgatcaatactagcaatagccaaggattttttttggttggttggtaatttttccatgtattttcctttcattcgtatgcttgttaatcttatatttctatttttctggtcttgctatgcagatatatgtattttactgtcacttgaaatttgtagcagaacatatacatatataattattacatattaaattatatcaataattataacacaatattcaacaaaataaaataatctaatgtaatatataattgtgatgtattatagtatataaagatattattataatattgtgttgtatattacatattataatgtgtaatatataataatagtatgtataataattaatgacatatataggattaatagaaatgtccgcaaagggtccaggaggaaccagatgatggcccctgggctctgacggaggcacaagctgagaagacagctcatatgtggacatgccatggccatcttactttgctgctagcgggtaaccactgcccaggacaggcaggtggcccagagtgccactggtgactggcttgctgtcagtgtgtgggcattctgaagagccagtattatatgttaaggcttttctttctaggctgtgttaaaagcaatcaaatcagcaaatacaggacttctgaaagcctgttgagtcccaggggctgatttcaccaggaattcatgatattttacattttgtattttagacctgtcacattaaagatttgttgaaaaccagtaagtaggtcaagtaaaagttattcaatttaatagaataagaactatgtcaatttattcttaccaataggtgacagaaattcagcaatcatattatcaggtaagataacttgtttgtgctgttttcccctgggacttttctgttttcccacccgatacaggagggaagtatgtggaagcgtggctattgagttattttactcagtgacttattataacctgccccttataactgagcttggatggagatgattttcaggacatcactccaaaagattcactaacctcttaaaaaaagagagctaacaatactatttaaaaaatactggaaacatttggaacataggttttgtaagtatttaatttttcagtttggccagcttctctgggagtatccaaactctcttaatttttataaaggaaatgtttcattttttggaggaataatcatctgattgcatgtaatgtttacttattgtataatttccccatcgctgctctaacaaagtgccataacttagtggcttaaacaacacaaatttatgatcttgtagttctaggggtcagaaatccaaaatgggtctcagctaagagtagtatcaggtaggctgtgttcattctagaagctctggaaaaagaggatccatttcctgtcttttccagtttttagtggtgacctgcattccttggctggtggccaggcctccatctttaaagccagcagagagattagcattttccaatctctctctgactctcttttgccttctgcttccacttttaaggacccttgtgatgccattgggcccacctgataatgcaggataatctcctaatgttaaggcaactgattaacaaccgtagtttcaccagcaatcttaattcacccctttgctgcgtgacctaacatatgctcaggttccagcgattagaatgtggatatctttgggggggccaatactcagccttctgtacttgtttatgaaatcaattttgtagttactgctgctcagtggcgcagaaatggacacgttattcagaacatacattaaaatatggtgaccaaacaggaagtagagagaagaaaggtacgacagaagagggggagcatctacccaagtcaatccaaaaagagaagcaattgttctccatctcctgcagttgcctctgtcaatgttccttatggacattgtaagtaattcccacggccagacatggcatgaagttaggtctgtagagcaggagagaataggggaccgtggagccatagagaggttttttgctagcacaacggcaacagaaatgttgggaacaaaacaggcttaggaataaaacatgcagaacacgcacataaaattaccagagcgtcctcatgatctagaccacaggccaactcttaggaggaatattaagacccagaacacaaaactatcatcacaaaacaccaaataactgcacttggacatcgaatctgggagagagacaggccggggatgattgagcctaatgggattgaagatcagatggctaagaggtgatttagcatttctgtcacttactcagaggtcacttcagagttgaggcagaaccacaccttgtgaaatcacagggagcccctggccaaacacccctccctcaagttacttattgttcacaggtgcttctttattacagttctacctgctgccatctcaactcaactctctcctacaactgctgcacattcggcatcgtcaggtaggacactaccagctcctctgccatggtaaattcaccatagcttctaagttgcatgaatgatagtcggtggttctgcaccctcactaggtattgctaaaagatcacttgagatcaaatgatttgagaggaaaggaacaagaggaccctgagatggtctgaatttcactttgtgtttgatcacctataattttaccaacaaaaaacatgataacgcaagtcttctcatttcacatgctttcacaaatgcagagtaagaagaaaagagatgggggaagtgtgtgttagagaaaaagattattaaagagtctcctcatatcttttgattttaagaaataaactacagcacttggccttatgtctgggaattatccaacttagagatgtccaaattacatctcagtgatcaccattataatccattttcacttgaccatgctagttgattctgtctccacttctgcatcacctgtaactgctgatatttcaattacaccatcatataattcacattctgacaatgctaataatcatctttagtaagtccttaagcctgtactatccatgtgcttactgagatgtgctgtgtctgttaaatacacactggatctttcaaagaatcaggaaaatgggtacttgttgttcaatgggtataagctttcagttatgcaacatgaataggttctagagatctgctgtgcaacatcatgcctatagttaacacaccgtactgtgcacttcaaaatttgttgtgggtagatttcatgtcaagcgttcttaccacacacccgaaagagacataaggaaacttttggaggtgatggatttgtttattaccttggctgtagtgatagtatcacaggtgtgtgcttgtatccaaacacatcaagctatacacattaaacatgcacagtgttttggtctatcaattatacctcaaaaattgttttaagaaagacaatactattaaaagaatgcaggccaggcacggtggctcacgcctgtaatcccagcactttgggaggctgaggggagtggatcacaaggtcaggagattgagaccagcctggccaatatggtgaaacctcatctctactaaaaactataaaaattagctgggggccatggcgcatgcctgtaatcccagctactcaggaggctgaggcaggggaatcacttgaacccaggaggcggaggttgcagtgagccaagattgctggtgacagagcaagactctatcccccccaccaaaaaaaaaaaaagcaaaattgctcattgacttttttatatggattacattttgtatttatattttaaactattacattgaaatgataatattttggatacatcagattaaataagatatattattaaaactaattccatcagcaaccagaaaatctgaaatttcatatgtagtttgcacttaatttataataaacagcattgccttccactgagacaatcacatatgttgaacgtcttatatggattttcttgtctaatccttccaagagctggatgaggggacttctaacacctcaattttcaaaatgaagaaacttatgttcggataggttaaatattgtcctcaaggttggtggaaagataacacaatctgacttcagagccctaaagcttaatctctgaactattctaaactctctaaaccacattaaaatcctattctaaaaaatattgacaaggcacattgcctattcagaaacaaggagtctatttgagatgacaaaagctgagactgaagagttcatctctgagctgggtctgcgtttaatttttgtacttttacccttgcctctcccaaactcacatatccattgcgcattgggtggccactgcaacaccagtgccagtcccctgccctgcctggtccaatcctccccatccctctccaagctgccctggcgggagtggctccctcttctagattctcacagctttttatctgtcctcactttagctcttattcctctctcatccagttgcatatgtatccacttgcttccccagtgacatgagggcagaatccatctttctcattttcaacattgcccgcagcacgtgcatgtgcacacatacacacagatatcttgaggacaatgtcagcatgtctgctctctgatgggcaggcattcagtggtggttaaataaataaatgaataaatgcttgaataaatgaatgtcatttggcttttgccagtttgcatatttatgtccacttctaaacatgaacaacaaagagaaaaaacacgttaaattcctagctctagtgtctacatgactaaatacggacatttttgcacgttaagtggcatattccacttacttgacagtgcagtgctcacagccacctactggattaggatctactctcttctacctgccatttatgagaccctcatgatgtttctttacccctttgtgcttctgttacctcatctgagaagtggaaacaatagccactgatttcaaagagttctgaggattaagtcactgaatcggtgtaaagcacttagcaggcagcctggagcatggtaggtacacagggagtgtgccctccttccgtgcctggaggaatgtcctgtgggatgctgtttttcacaaggaggggcttctgccctgtagtggctaggccaggtgaaaagggcatggcatttctgctctctgctgtagccaggtcattttatcatagttcctcctccagcccctggaaaccaccagtctgctgtctgtcgctacggatttacctatcctggatatttcatataaatggcatcataccacatgtggcctttcctgcctagcataatgtttcttttttttttctctcttttttttgagacggagtctcgctctgttgcccaagctggagtgcagtggggccatctcggctcactgcaagctccacctcccaggttcatgccattctcctgcctcagcctcccgagtagctgggactacaggcgcctgctaccacacccggctaattttttgtattttttagtagagacagggtttcaccgtattagccaggatgtttctcaatcttctgatctcgtgatccgcccgccttgaactcccaaagtgctgggattacaggcgtgagccaccgcgcctggccagcataatgtttttgaggctgctggttcctttaaaaattatccattttgaatgagcttgtataaaggtagttgaaataaagggtccctctttctattcaacgttaaatatcagggatcattttcttgtttatttttaatttttattttcttttttgagaaggagtctcactctgttgcccaggctgaagtgcagtgtcacaatctcggctcactgcaacatccacctcctggattcaagtgattctcctgcctcagcctcccaagtagctgggattacaggtgcatgccaccatgcccaggtaatttttatatattttttttcttttagtagagatggggtttcaccatgttgtccaggctggtctagaactcctgacctcaagtgatctgccttccttggcctcccaaagtgctgggattgcaggcgtaagccaccatgcccagcctggtcattttctttgtattgttttttccagcagttctgtcagcttccaccaccccggaagatgttaaccacccaaccatatcatcaggtaggtcaatgagctgctagttaaaacaacaaaaatgggtgtgatgcattgatgaaaggttgaattgttgtttagggccaggggagatatactaccaaggaatctaaggaccatgtgtgtaatgcccaatgtcacttgcagcaccacatttgaagctccatgaggcaaggcttttatctgtcttgcttgttactgtatccctagcccctatcccaatgcttaatatattatagacacacaataaatgtttattgaaagaataaacaaatgtgcaggtgttgcatggtgggcaggctgttggacccctcttgaggcagctttggcctcagccaagaacaatcctggtagacagtgtatagtggaggcaaatctctccactcaagagacacaggtatcactctgagaaacaccagcagcccctatttgtacaaatatcctgcctcaaagagaagttagtatcatagcaaactagtgaagtcagatctaacaaatatttatatttttcagtgtcagcagataatgaaaagttaccaactaccctagcaggtaagcaatgattctatcattcatcctgtggatgggaggccttaccatccagaggggacatccaggcaggtggatcactaggttgtgtgatgtcttccatggggtcatctaagataatcagcatccttatgaatgcaatgatttttacaaacttttcccaattcatcaatgacttattttactactgctgagtgcctcctgcagaacctggggctgatgcagagttaaaggggggagtcatatgggtatttggggacagcagggtcacactgaggagcttaacctgaacttgactccaacctcatcagaagaaatctggcagctcattggcagcttgtggctagtccaaatgctttggttaaggtgtggcatggctgggggtgcttcaccagctgctagttgagttcttatctgatctattctgtgttcagccggtcctaacccccatttccatgttgttccagtgctacctgtggctgactcagcatctgccagccgtagggccaacgtgcctgggcccagcccttcaggtgagcaaccttcctgaggatacctttttgctctccaaaccacagagtgaaggtgggctcatcccaatgagggaggagcctgggggagcagcaccgtttgcagcctctttggcgtaaaggggaagcacaatcctgagaggacctcgacctccaggactggggccgattcattgggcctcccagacagcatcctcacttgctgctgttccagggaaacattttaaagttcagaaaatacagagaataagaaagcgaataaccatgcctgtcttatctaaatatgaccgatgcttgcatttggttatattggttttcctgtcctatcaatcaagaaataaaacatggttaaatttgaagctcccaatagtcctcagtctcagtcttttctctgtccttcctcacaaacactcttaaattttgtgtatatcctaacctatgtgcttgtgccaccaagcaagactaagcatccaccttaagaattagatatctttttgttgtaacctatttttaacctgttaaaggtagctttttatcaatgttgagtgtgtttcctttgacaccagctattgagttagtattttcatcatccatatccatataatgataataattctaaaagtaaatattcgtaagacttgtctttatatcttacatatttttatgtttaaatatactaaaaataagacttaaaagaaaagtataataatctgctttatgagttaattaaatgactatatttgacaacctttattccaggaaagggctgttaagtattagtaatgctccccttgtgcatgctttatgatgttcacaggtattttacacacactgaaacactgcaggacttatcagagccctttctctactagtggacacgagcattctgtaagaggggactatgttataccaggttttcctagctttacctgactgcaaagctcctactgctcactgagattgggactagtgtctacaaaaatgagtttaaataatgctgaactccaagtgcttagaacatgccattaatagttgttaaatacctaatcaaactgttttaagtgaccttatccccttgagtaattaagtttccttatgacctttgggccccgactctcatcctgatgattctgttaaacaatacatcctaagggtaagaacttttctttctccctccctctgcctgaaatgcccccatttccatcatgtccagattgtgtctccctgtgaaatcctatgcttgcttctgggcccggttgtagaaggactttcctgagctccaccatcagcggagtcttttctctgcctcagagtatcatttgcatacttttctagcattttacctcttctgttattaatagcagagctatctggatgtttctactagtccccaacttaattacaaacctattgtttgcagggactcttatttcagtaaacaaattgcatattctacaggtcctatttgattgactaaacatccttactaacagaagtgatgcaaaacattattaatgttgggtagatagcttactacacagtagtgggtttgagaaacttaactttgtggttttttaatgtcttagtttgataaacaattcaacttaacattagctggttggtgcaagggttctcgactgtggcaggagctgaaagaagactcagtcaccacagcagtcccgcctctacacttgaattcctaggtttagtgcagtgagacgagcactggcacaagtcaactaaacaactcgattactcacagacaggcagcagggatcctcagaagcctaggaccatggggaggtggtcccccaaggataaggaaagctgcccagggtggatggagtctcatctgcatgtgctccacttcacaacacagcgagggaccctgaaagcattccactcagggtttgatattgctgggggccacttggctcatgttgcagagcatactgttctaggaggagcatccggctctaggatgaggacaaagcccaagctgtcccagacagttccttcttgtcccaggatattgcagtctcagcacattctgcagttattctgagaactatagcaggaggggtgcagacctgggctggccaaggccattaaggacttgttcttctgcagttggccctggcatgaaatcaggacagctctgtaggaccagtttcttttatggtaagaaatgccctgaatacagaatcctcaaggtaacagagatgatggagacttagatgaaaacataattttccaaataagatggctattaagctgtgggttgaattcttgaagaaattttcactattttttatttatattttttaatgttacattgttatttataatgacttttttgttgttccatatagttggggtcacttcggagacttcactggccataacccctgtgtcctccacacttccatcaacaggtaaagacttgcctgggaaaccaggagatatggatgctgaggtccccagcatcagtccaagctaggtgaaaaggcatagggtcactttgggaggtagctctgtataatagaaagagctgtaaattctttcactttcaaggtgtgtgatcttgagcaatttaggtgttctacctgagtcagtttccttttctaaatcaggtgcagtaccccttttcagcatggtggttgaataccttaaaaaatgagagaactaatatacaagaagtgaatggttgaattctaggcacatgtttatgtttagctctctccaatatcataaattcacaaattatagttctgagagtcgatgtattagaaaatcttaacgccaatatggttatgaacattctggatatcaggaagtaactattacctgtaaacgtgcagttaagccttgtatgcgttgccataaatctctttatattttacgtatctctgtccatgagtttcgtagaataaaattactttatgaataatatggccttgtatgggatccttccagaaacttctaatatagaatggatccttacaaacccatggatccttccagaaacttctaatatagaattcaagataaaaccacctttttctgaggggaggcttataacaaagattggtcatttgaaactgaaggtgattatgtcttgctgtcctggccacatgtgcaacacaagcttatgtgataaacagacttagatccaaaaaggatgagagaaatatctctgtcaccagaggccagtcccagtacttctcctctttgtgccttcccagtagcctggatggaggtgaggctgctgaatggcacagggaggtgctcaggccgcgtggaggttcttgtccagggcacatggaggaccgtgtgttgcgtgacgacctctggaatctggccaaggccactgtcgtgtgccgccagctacagtgtggacgggctgtggcagccccaacaggggctcacttcggggcaggctctgggaaaatcctgctggatgacgtgcagtgtgtggggagcgagagccacctggggcagtgcgtgcatgggggccgggccaggcacaactgtgggcacctggaggatgccagtgtcatctgttcaggtgagggctgtcacctcccaggacttcactattgtcacaggcagccaacactaatagaaactactggacaatacattataaataacctcatagattttgatctcttgattagatgctgatggttctccagcccccacccgcaccacaggggctgaagcagcttctatattggacatgctcccagataggtctaatctttgggtagtttgctttgagtatacttttctttctaaaagtcgttttattaagtcatggtagagctcctccagggctagagtcctctagtcctcttccacttcacagtcggagggacctgttcatgacaagtctggagataagaataaacaaataatggagatatttaggcagtggaatatttgttgcatcaaataaatcccattagaatttctcaatgattttttgccaagagttattgttagaaaatatcaattgttcccaaataattcatgagctctaatctaattcatgaaaccctaggattgtctgcactggtgtgaggctgttacctctcctggatgtcaccgcttctgtgtcttttcagaaatattcaactcatattctcggaagtcatttagcataatattgtaatagcactgtaaaccatagcatgttgatttctttgatcatcaggtgctggcaattcatcaggtcccactccaaccacagattctgaagctgccacgccatcatacacaccatcaggttggtccaatctttgcttggttctttcgcattgtagctttcctccatagaatgtctctttcttaagccaagatggcagggcctttgtactgcacaacttccagggctccaccttgctagaacgcattgcgcattgcatcctcatgcacatggtcacatgccatgagggaatggtggtccctggggtcatggagctaggtggtcctacatggttgagtcactctagggttaagatagttaacaatcattccacatcacagcacaccatacagaggggcacagagcagaagggaaacaagtttctcattcattccatcacctagatttcttaaataattcctgaacttgcccaaactatgcctgtgcattggaaattttagttgtctccaaatggtttaggagctcagtcaattgaaacaaaataagttaggattggattaatatcccccaagagatacatatagtgttcagaccaggtattaaaaaactgcttatagattcccaaattggtaaatatttgcatcattattatgtagcatcctcttaattttgagaatctgaaaaaagcagaaataagtggttagaagaggatgcaggaaacaaaaacacattgttcctccctctgtagatatttgataggagagcaatgaagcccattccctccagcacacgataacatggacaacagaacagaacgatggttagtgaaattcccacggtgggggccacacactcacagtagtaccttcttggcccagaccagagctgactgccagctgcttcactttcaggaaaaaactctgtacatttctttctttttttttttttttttgagacagagtctcactctgtcacccaggttggagtgcagtggtgtgatctcggctcactgcaacatccacctcctgggttcaaatgattctcctgcctcagtttctcaagtggctgggactacaggcgcctgccaccatgcttggctaatttttgtatttttagtagagacagggcttccccatgttggccaggctggtctcaaactcctgacctcaggtgatccacccacctcggcctcccatagtgctgagattacaggcgtgatccaccgcaccccgtcaactctgtacatttctgacatattaagattgattttacattgtattatatgaccaactgaaaaaaatgaattacatgattatttctttttctactccaacccactttaaacaaccagtttgatgatttaaccacttctggacagtctactcccaaactattttaaatgatcacaataatagagagggtattcaatcgttttgatttacatacatatataaagactattatgaaaagtatcaaactcactgacagatgctgaaaatagtacaatgagccccagtgtatcaactactgagttttatgaaatcctaatatttgccctaattgtttgagatcctttttaaaaagaaacaacacaatacctgactgctatttaggagttaataagatgaaaagaggtgtcttaatgctccgtgaaagcctcacgtggcttagctactcagagtccagatacagccaccaaagatctagatggaaaccaaaacattcggccatttcattgactgccatatccatggattgctccaaaaagaaaaagaggaaaccatccacaaatggttttgtgggcacttcacaagctacagtgtacaaaccaatggtgtgtcctcaaagtattagcacttttcatttcactgtggcatctgatatctagtgttgaatgaggtggcaggaaggagatacaggggccaccagaaccctgatgggacacctttggaaccagaagttctctttgggcttatagtcagaagttcacactcccatgtatagccaggaggtgtctagcagtgaacaagggctctctttgttttgcattcacaggtcaagcactgtcattaactaccacagagcccactgtgcttcccccaactcctccaacaggtcagttggcatttgttttatggagaaagggaaccatgtgcccagcactggcctggtgccttcccagagctgaagccacgctaagtgctaaccatactcctgcaaattctccttgcctctggaggagctgagtcaggaactgatgctgcatatttgactgtgaccttcaggccatgtgtattttctttttttaattttttttttttgagacggagtctcgctctgtcacccaggctagagtgcagcggtgtgatctcgactcactgcaagctccgcctcccaggttcacaccattctcctgcctcagcctcctgagtagctgggactacaggcacctgccaccacacccagctaatttttttttttttttttttgtatttttagtaaagactgggtttcaccatgttagccaggttggtgtcgatctcctgacctcatgatccacccgcctcggcctcccaaagtcctgggattacaggcgtgagccaccacagctggcccaggccgtgtgtatcttcaaacttttgtctttctaaagttggttttaggggatgtcctaacaattaggtctgcttctgtttgtccctgtgacaggtgctgggttatctgcaaccatagccacaacagagcctgtgtccctgccatccacacccatgcccctggcaggtaagtgcttgggaaaatgggggaaggagctcacacttatgaaacaaccataatatgataagcaaagaatcagacgctgtcactagtctatgctcaaaccacctacaagtgttacccttccccccacctcacctcactgtttcataaaatgagacacagaaaattttcctagtgtcacccgactagaatgtggtagagccaagatttgggcacaaatatgtctgactccaaacccatatgactctgcttagccagttacctttcatggtgggacagtattctccaaagctacctttgggctaatgggaagagaacatgcttgcaagcctaattgctatgtcccaggtacatcaagactataactaggaaatcagagagtcggctgcgagttgtcacctactctatagcttttaatataaaattcctaatttatattttccactgtaataattaggcaagacttatccttttagtttacctgatactgtatatcaggtgtaaacccaaatcccagttctttccttctaggtgggcaggaaacatctatacatctgctttacaaagaaagaaagtttgttgtagcattctgacactttaagcctggttctgcagtaactcacatcagtagtaactcaatttgtctaggccaagcctaatggtgtgtgtgcatgtctgtgttttgaataaatactatggtggaagtttaaggctgtgtagatgtactaagctagccttacagtcattctgctacctcctcaaaaaacactacacagcaggcagaggtctctcctctgtttcaggccttcacttgggccactttttgacattctgggcccctaggaacttttgccttcagggacccctacctccgttaaaaaaaaagtatatttatatacacacagatatgtatgtgtatcttctattttatggttgtgttggtataaagactatattgtagtcatttcttctgattttaaaacaaatgaaggcaggtttgggagcccttaaaagtcacgtggaccccagtcactgtgcctgccacatctgattgaggcatctgtcctgctcttctgtgttcttccaagtaatgaacacgtgcagacccgctagactccagcaccacaaggacatttcgggaggaagaatacgatgcatttcccctgatttgagactgcttcaaatcagggtgtgggggaggattctgatttatttcataacctcctcggggtagaaccgatggactgtggtaagagctgtcctaaccttatgccctccttagggctaagccataggcagtctgccctgtcgatagtgctgcacagagagctggccccattttcagacacaggttgctcgcaggagctttgttgagaaaagaggttcattttttatgcatagttcctggcagggttgagttgagaacagtagttaatggtcacactgaataatgcaagtaggagtgggttgtttatgaaatggaggctgctggctcagaagaactggagcctgtaaaggggggattgacctagaatctctcggaaaaccttcccttcccttctgagcataatctacttatgattatcataacgactcacatttccactacatttttcctcacatatattttctaacttggtctcaaaacaacccatatgttagatatgaaaaatatttctgcattggattattgacgttatgtaatattgtattgtattgtactaccactcctattttgtaagctagagcactgttaatataatgagacacagactctcaaactttttgtttaagaaatctaatggagtagtaggttctattttttacttctcctgttggcttaagaaaaaagcctcaccagtgtttctagaaaattctagaacacagaatgtcaatataaatatcatgatcagggcactgaattactaaataaaacaaccatcagaattccagatttttgagaggtttaacaattactttcactagacatagaaataatctgagatgatttctcctttgttttctccatcctatcactgattaaagcccttaaggtgtaaactcttccttatagagccttgcacataataggcattaagtgaatattctgtggtttaaagtataactgtgttggcagcaaagaaaagaaatgtctttagtgctagaaagaatgcgctgtaatctccagtctgggacattcccccatagcaaggcgacttccacagaaagactagcaagcgtccactggggcatggctgagaggactccccccccaggtcaggggtcctctggagttcttgtgccatgtgtaggcttaggcgacatgtgtaagttgggagcccagggatctagcattacctctctagatgtctaatgcaactgctcaccagggtcttctggcctccttgaggcacttccagggagtaggagttccagcccagattttccaagacccatagaaatttctgtctgcctaacccagaggaaatacccttttagttacacataaaggtagaataagcacttctctccctcaaaccttattctcttccttgatctcaggtctttgaaaccaaagccagaacatcctacaggctatatcagctctctactctgtatgtaacctgaggcacagggctcagcttgagagaaggaaggagaagggtaacttcagggagggaaatacatataaaaaagttcactggccttagaaagctgtacaaaatactaatcaaactacccagttccaattcacattgccactttggccctgagaaagctaacttggactttctgagtctcactttcttcatgtgaaaaacagaggtaataatagacccaaaagagagatgtaatggtcaaataagatcaagcttataaagaacctaggatggcacctgctattggtaatcacccatgaaatgtgagtggtagaatttatgattattattcttactattattcttcctatgaaataatatcatatggaagatataagtattatgacatcagcaatatatcagcacaacataataagactaaggcaatgtcctgacaccaaaggccactccccagtgtccctacttcttgtgcctccccaggagcctggatggaggtgaggctgctgaacggcacaggaaggtgctcaggccgtgtggaagttctcgtccagggcacgtgggggaccgtgtgtgatgatctctgggacctggctgaggccactgtcgtgtgccgccagctgcagtgtggccaggctgtggcagcccccacaggggcccactttcgggcaggctctgggaagatcttactggatgacatgcagtgtgtgggcagtgagagccatctgggtcaatgcatgcgtggggaccaggccaggcacaactgtgggcacctggaggatgccagtgtcatctgcacaggtaaggggctgttttcttaacaagaagtcacttctttgttttcccttcgaataatacttaatgattgattttactaagcattatattataaatggcactgtaaatgttagcatgttgatttttcttttgatcatcaggtgctggcaattcaccaggtctcgctccaaccacagagcctgaagctgtcacttcatcatacacaccatcaggttggttcaatctttgccaaagcaaaagaaccaagcaaagatttctgtctcttgcataagccaggatagcacggcctgatagagcatggtgttacttttaacctatctgtgtctttaaatttatttatttatttattgagatggagtcttgctctgttgtccagactggagtgcagcagcgtgaactcagctcactgcaacctctgcctcccgggttcaagcagttctcttgcttcagcctcccgagcagctgggactacaggtgcacaccacaacgcctggctaattttttgtattgttagtagagatggggttttgccatttagctagctggtctcgaagtcctggcctcaagtgatccactcatttcagcctcccaaattgctgggattacaggcatgagccactgcacccagccatatctttaaatttaaagtagagttcttttaggtaggatatacttgggttttgcttattaaaaaccctatttgaaatctctgccttttatttgtggtgtttagaccatttatatttaatatgatgactggcagatacagcttactaattatccattgttgtataacaaattacacaaaatttttattttagaatgacagatatttattagctcagttcctgtgggtcacatatcttattagcttagctgggtggtcctggctcagggtctttcatgaggttatagtcaagcagtcggccagcggtacagttaagaataggcttttttctgagctcactcacatggtttattggtgtcttctattcctcatgtgctcttttacttaggacttgagtttcttgatggcttctaactgtaggcttctctgaattccttgccccatgggcctgtccatagggccatgaacaaaatagaggctgacttccaccatagcaagtgatgagagagagacagagagagagctcaagacaggacccacagtcttataattcaatctcagaagtgacaagtcataatttttgctctatactattgatcaaaagtaagttattaagtccaatccaaaacacagggagggaaatcaaaccctagctcttgaaggaaggaatatcaaataatttatgagtatattttaaaaatcaccactgttaagtttaaatctaccattgtgatatttgtttaaatttaccattttgccagttgttttctattcattctacctgttcttttttaccacgtttttgtcttctttttttggaatttattgttccattttgtctacttttttgtctgctaggtataattgcattttaagtggttactttaggatttataataaacatcttttctatgtggcatcctgtttcttctgcctgaaagactacctttaatacatcctgtagtgagggtctactggtgacaaattatttcaccttttctgtgcctgaaagcatctttatgtcatcttcatttttttaaagataattttcctgggtatagaaatctaggttgacctttttgtttcaatgctttaaatatgttatttcactgttgtcagaatttcattctttctgtcaagaagtctattgtcattatcaccttttttctctgtatacaatgtttcatttctggctgcttttaagatattctatttatatgaattctaatctatttggttataacgtaccttgggatagttttcttcatgtttcttctggttagaggtcattgacgttcatgaatctgtggttcacagggtttttttgaatcaaatttagaagtttatctcttcaaatattttgttcccatcttttcttctctcctttatgaactccaattaaacatacattaggttacttgaagttgtctcacaattccctggtgctctgctcattttttttttagtttttttttttccccatggcatttagctttggatatgtcttcaagttcacttacttttttctctgcagtatctaatctgctgttaatcatatccagtgtatttttcatctcaggcattattgttttcttcttgagaagtttaatttgggtcttttttatatcttccatatctatacttttcatgttccatctttcctctaccttcttgattgtatgatataattattgttttcattctctagtgtaaaaattatattatttttaccatttattggtctgtttccactgatttattcttcccatcatgggtcatagttttctgtttctttacagccttggcaattttctattggatgccagatgttgccatttaccattttgagtatgagttattgtttattttcaatcttactttaaatcactcaagttacttggaaacagtttggtccatttaagccttgtgattaagttttgtcaggcaagagtagagagaactttagtatggagctaattttccccactactgggaaatacccttctgattaccataccgaatgcctcatgtattgcctggtttcactctggctggtaggaaaaggaactattcccatccctgtgcaatcaccaaagattgttccctctactccttttaggcagttcttaccttggtcttagatatttgctccacacacgtctgctgattagtacttagataaaaacttgagagagactctctgaaaatctctggagctctctctgtaggcagagaggtgagcaacctccagtacttcccagtgaactctagccactttgttttccctgaattttcagatctatcttttgaaggagtctgccaggatccacctgggttcctcttcactctgttgtgctctggaactctaattaataacctagggtaattataggactccccatgctcattcactctctcttagtgattgctctcctgtgctgcctgttgtccaagatcagaaagccataatttaatgtattttttctgatttcttagttgtagaatggtaaatctgtacccaattatggtagttttctgttgctgccataacaaactgctacaaacttagcagctctaaacattatcaatgcgtcatttttataattctgtaagtcataagtccagcgggcttagctgttctgtttcaagtcttgaaaggaaaaattaagatgccagtagaaatctgaaggagaatctatttccaggcttattggggttgttggcagaattcagttacatgcagttgtacaactgaggtccctgtttccctgctgactgctgggtgggggttgttctcagattttagaaaccactcacattccctagctcatgaccccttcatcttaaagcttgcatcagtgagtcaagtcattttcatgctttttaaatatctcctgcctcttcttctgccatacctctctatttcagccagaaaagattctctgcttgtaagagagaattagattggatgcacccagaaaatccaagataatctcccattttgtgacctgtcaccttaatcacatctgcaaagtctcttctgccatatcatgtaacctatttgcagattccagggagtaaaacatagacagcttaaggaagtcaatatttaacctcccacaccagttactacatctgagatggaaatcgaagtcagtttattttattataaaatgtattaaaaccaatgaatacgtcaagaatagtgtaatgaacaattgaatactcactagtagattctatcaaatattaatatttattataattattttagatttttaataaaacaatacagtaattaaatgatattttatgagttaataggatacaaatggaggcttattttgttatgtgagcctcccatggtttaagctactaagagttcaaataaattcagcaaacatctagaaataaaccaaaagctttagccatttaactaaatatatctggtttgttcctaaaaggaatttttcctttcagaatttattttatgggtgtttaaagggttagaatgtgctaactaggtgagagttctaaacgtactggattttccatcccattatgctctaactagcgatagatgaatgtggtagagaagggagagtggatgatcctccctacctgaatctgcctcttggggagccaaccaaaacactgactggacacatttgagcccagtcattctctttgggcttgttgtcagaagttttcccttctgtgtgtagctaggaggtatctagcagtgaacaaggcctctctttgttttatactcacaggtcaagcactgttattagctgtgcccaccacaaagcctgctgtgcttccctcaaccccctttccaacaggtcagttggcatttgttctgtggggaatggggaaagggaaccgtgttccaagccctagcttgtcccttcccagatctaaagccacactgggtgtgatcatactcctgcaaattctccttgcctctgagaagctaactcaggagctgatgctgcctatttgacggtgaccttcaggctgtgtctattttcaaatcttcatctttctaaagttgggtttagaggatgttctaactattagggatgcttctgtttgtccttatgacaggtgatggattatctgcaaccatagccacgacagccatgaccctgccatccacacccatgcccccagcaggtaagtcttttggaaaatgggtgaagtagctaacatttatgaaacaaccatgatgtgataagcagagaagtagatgctttcacttaactaacatctcattttatgctcacacaaacctacaagtaaagttactcctgacccaccctcatttttttacatagaaagacagaggaaaattaatttacctaggattaattgactagaaaatggtagagtaaggatttgagcacatactctcaggtcccaatcccatatacctctacttggccaaagcttctgagggagacaatgctagagggacagaaacttccggcagacctaattgctaagacccagatacatcaagaccttaattcagaaattgtaaagtctgatgtctttcagatcgtctgtgtgttgtcttttgttttctctgaaaccttttaggacctttctctgttcttgtgtcttgagcttccatgatgttttaccttggtctgagtcttttttcacacattattctacatactccatttaagcttttagtctagagatgcatattcctcagttctcgcaaattttcttgaattatttgtttgataatttcctcttgtctgttttccgccttgaaatcccttagacagatgttggatttcctatattgatcagctaaattttgtaatttatttgtttttaattttgcattttaagatcttttgctgtgtattaaagttttattcaacattatcctttaagtgtttggtttttaaagaaaattcagccattgtattttttaatttccaagtgcattttcttattgcctggcttttcctttttcataactttctgttcttgtttcacagatgcagtaccttttctaactgtctcagtatacgtattataactctactcaaaacttttttctccttttgttgtccctgtttcttttctctgtttttctagttgttctaatttatgcctcttaggctggatacttttcttaaagatccaggcattcctggctatctgtttgcatttaagaatgaggcactaaggagctgatgcaagttaggtgatgtctctctgctggttttccagcagcagaatggggaaagacagctaacacgtccagatctcagctctaccctcagttcacctgatgtctgcaagaatggaccttcgggatttaatttctccagagaataaattccctggctgtgagcggggaaaaaaataaaaaacccttctacagattttcaaccaacaaccctttttagcatggtagtgattgaccagtattggaaaccaggtgagttattagaagagtcagtggtcgtgtccttaaaacacaaatccatgcaaagatactatttaaaagcagcttgtttatagttttatcatggaatagatgggactataaagctgtttagatcatttgtcttgcatgttgtagttttgtataatacaacttatctgttttacaaattagtttacttcattctgcaaattatggtgcctgtttctgttggggtgatcagacctgacaccaggccgtgggggctacagagtccagcagagtcaaaggaatgagaaaagacaggttaagagtacataaggtgggtccagggggccagtgctggtatggaggctgcaaaggcccccaagctctgggagcctacactatttactggtgatcaacaaagaaacagatggtgaggacgtgcggatgtgggggtagaaaggtagtggtgcatcaagtgtagctgtgtcggtttcgcattttctttgatgcatatagctgcttgagatgatggagaacatgtttacgagcctgggagagcaaccaataagtctgtgcacattccagaggccatgaggggttttatgccctgagccctggattccatccaagccacgaggggttttatgccctgggcttagatttgtggtgtggcagggcagccttccaccctttggcacagagcttggtgttccaaaggccacaaggagttttagaccctggaccctggacatcttctaagactcttatattatgacagacaagccagtcctgcctcagctcttctaccaacatgtttcattcctcagtagcaagtaaagtctcattttcttaatttaaaatttaaagttccatattggaatgcttgtgttcaaatttgagaaggccacatagaaatgtatgaccttgagcagattacttgaactccctgagttgcagtttctttattagcaaaaaggaaaaaataattaaagcaatatcaaagactcattgtgagggtcaagtaagattaaacttgtaaagcactcttatggtgtctataaggtggtaaaccctatgaaatattagtattgttattatcattatcatgactattttgtggtatatgaaagatattaatatatatataactagtagtataagagctcaatataacaggatcaaggcaatatcctgacacaaggagcccagtccccagtccccttccccttgtgcccccacaaagaacctggagggaggtgaggctgctgaatggcatgaggagatgctcaagccttgtggaggctctcatttagggcacacaggggaccgcatgtggtgatctctgagatctggctgaggccaccattgtgtgccaccagctgcaatatggccaggctatggcagcccgcataagggcccacttttggtcaggctccaggaagatcctgctagatgactttcagcatgtgggcagtgagagccacctggggcagtgtgtgaacaggagctggaccaggcacaattgtgggcacctggagaatgccagcatcatctgcacaagtgaaggaatggctctcagtcctcacttagatgtaaaatattattccccaggatctttctacagaattggcagtgctgcagatagctcacacatgagagtatatagatgatagatgttctctctttactggtaggtgccaagtcttcaatcacttctccaacaggtaggaccaacttccctttgttaactagatgaaacacttgtggatattttctactgatcttaaccaagagccaaagatcacctcctacctcatcttacaagtcttctttctagttcatcttgcaagatatccagctgacctccctgaggaaagcaatgtactctgcgattgcctccacagagccttcttaacctgcaggctcaaactgcagggactggcatgcacagcttcttacgaacaaagagcagcatccaagctccctaagtggtacaagcctgcaggaacctctgtacatcaggaaagaaaataaaagtcaccttgaatatattagtcctcgtctgtgttaggactagttccattttcttgccctttactgcatatgtgagttgaaaggtatagaagaatgatcaacatcacctttctttggcatctgtaacacctgaattgctagcttccaggcaatgaaaccacatcattaacacgtgattgaacctagttagtcaatttaagaaaataatactctgtgattcaggacacttgatatttacaaactgccaccatacacgtgatttaatttgatcctcacaatatccagtgaagttgccaacacagagactatctccatttctcagatgataaaactaaggctcaaagaagcaaaagagctttatttgtttttcttacatcttatctgctgtactcctttagaaaacatattgacacatagtagttgttcagtaaatggtgccaatgtttatcccggtatttcaaacatccaactacctgacatggaattgaaaaatgggaagtcgatacaagccatgcaacatttatgcttggtaataaatcatcaggctgattgctgccagattctaaaccacatgttcaaataagtgtgatatcagtcttctgagaaatgtcacacagataataaagtcagtactttcatatttttcacctggggacactttctgtccatagtacttcactcctgagataatttggctaataaacaccaatcatggtggtccctgatgtgtgtctttgtacagaatcaaagacatataaagtttaaatttggatggatacttaagaacgtacagcaaaaattctgagtttaatttcctccttattcccatatttttacatcagaaaagaagacaaaatgagcaataaaaatgtagacttcatacagttaccttattttacctgaatcttgtttcagtaagaaatgagctggttagggttaggatctttgaaaacaagtagacctggcttcatatcccagttcagacacttccaagcactgagcttctgggcaagcaactcactctccctgagtcttggtttctgcatttgtaaaataggaggaaatagtccatcccttacttggtggtcaagaagttaaaacaaggtcacccaggcagagcatttgacctagtgtctggcaaagagatagcatatgataaatgcgatcctagctaccgtcttgttttgtctccgttacagctcctgagtcatttgctgctcctggggcaacaaaacccacaatttatggtaagcccctaccacaaggcacacaaacacctggacttaaagtgctagagcattgggctggagaggactttcatgaacatctggtctacctcttctgacctcaccctacccccatgtccccaacatcagcctgaacccattgagtgtctgagtcctctctgcaatatctgcccaagtcatagactgtgagacatctgtatattgcacttgaatgttatcacttagctaagtgaaatacctaaaagagtagttagggattacataggttactatatgtaaagttcttagcaaccagtcccctgactatcctggcgcgtgtgtgcatattcacacacacatacacacacacacgtgcgcacagagacaaacttaattattccattcactgaggtagtcagatttttaccatggccatttagtgagcacttacacatgtgccaggcgtggtgagagagcacagaaagaagtcagacacagggacagcagcagcagcaatggcacctaacattaactgagtacttactatgcaccaggccctatgtcaagcttatatcatgcattatcttatttgttcctcttggttattattcctgttttacaagctaggcacctgaggcttagggagcttgcataacttgtcctgttctaactctaaaactgatgctcttacccactccatctgttggtccctgccccaaatgtgtctattatccagtaaggatgtcagacacacactaggccaccaccatcaatgtagatgatgggaagtgccatgaaaggtatacagaacatagaagggagaggattacaactgggggattccaggaagggtcgatggaggtggcaaggggaggagagctgtaggatggatagaattttagcctgtggtcctggggatagcaacagcttctaggagcaaagagaaggacaatgcttgaaggaacgatttacagccaggggtcctgtaagtaccttgtgagggtgcttgaggtgcatgcatcccatcacactcacaggagaccccacagctcattggttattccgtgtcttcctctgaataggcaggaaagaggtaatctaggatttgactttgctgcgttgattatctgttggacactctcattttacccatattcctcagatcttaaaggacatatgagcacagggagggcccctgagccttaagtcttgagttcgttccacaggtatcattggtctgactataactcaattcctaccatgttttctcacttgtcccagagaacaagagtggtaatattcattaaacactgattatgcacatgctatgctatgttagcattttatatgcattaccccatttagtcctcagagcaactctactaaatgagcattattgctatcaccatgtttgcagaggagaaatcaggcaggaagaggaacttgcccaggaccacaccacacagttagaaagcaatgggtgtggaatgcaaatgcaggcagtctgactccagagtccagggagtcatgtctaagctgaactgattccctatgggaggagaaaagaggagaatttctgcccaccagcatttcactctggtgggcagctgctgccatttcagggaaacaggcagcccagcaacttggataacctcagggagaaagcgtttttatatcaaaggcaccaacatcttctaaaattccaccatcagttaccagctgcaggagcctgcatggaggtgaggctgctgaatggcacagggaggtgcttaggccgcgtggaggttctcatccagggcacgtgggggacggtgtgtgaccacttctggaacctggccgaggccgccgttgtgtgccgccagctgcaatgtggccaggccatggcagcccacttcggggcaagctctgggaaagtcctgctggatgacatgcagtgtgtgggcagcaagagccacctggggcggtgcgtgcacaggggctgggccaggcacaactgtgggcacctggaggatgccagtgtcatctgtgcaggtgagggtctggttgtcaatcttcatttggagggctgcttctagttccttcactcctctctcctctacacacacaaaccacaccccacagcttagtccaggaacatagtggagccaggcaggtaactggtactgcctacagcctttcaaagttctacataagcctgaccatctccttgactgcaatgatctgtaagtatgactcacaggctgcacccaggctcagaggtaaacctcttcagtttgaaaatcaggatgaacatgaatttaaaaatcaaaacatttgacgtaaaaattcaaattcttacatgttgtaacaataaataagtgaaagcagaatttcaggcacagaacaatgcatcctttcactacattaactggctggatctgagaaagagctgttcctttggacatggaatatctttgcagttttcacagcacacacctccccgccactctatttagcttacctgcatgatcctcagaaacttttgagcttgtggcatccaggtaacaagccaaaacaatcagctggtgttcaggacctccatgttcctagcctaccaaggttcccacaccaatctgtccccctggtcctccctagtcttttctggtcctctcctgcttgcagctggaataatgtctctatgaatgacaagctctgcaggttgaatctggctcatcctgagccacatcccctctgtggagtatggggccttcctcagcacctgaggcccctggggaagtactggctatcctgggacagtcaacatttgctgcccaatgtcctgtctcaaatcctcaggaaatgccaaaatcctcaagagcaaagcctctgcctctttctcctttccattgccctaagctccctaaatgtaggaagttcccaataaacctttgccaatgaagacaagataacatgcacaattcttctttatgttgacaggtgctgattccacagctgctctgcctacaggtaggactgcatgtcacattcagtgtcaaatactagacttaccctgatgtaaaaaagattgtgaggtttagaatcagatctttatttgattcccagcatcatttattcatgcaacagatattggctgggtgtctaccctgtgccaacttctgtgccaagcactggggatggggatacagcggtggtcaaaactgccctgtttcttcttcttctcttcttttttttttttttattttgagatagagtcttgctctgttgcccaggctggagtacagcagtactatctcagcttactgcaacctttctctcccgggttcaagcaattctccctgcctcagcctcccaagtagctgggattacaggtgcccacgaccacgcctggcaaattttcgtgtttttagtagagatggagtttcagcgttggccaggctgctttcaaactcctgacgtcgggcctcctgatctgcccaccttggcctcccaaaatgctgggattataggcatgagccaccacgcctggccccctgtttatttttttaatggggtttatactccaacaggagagatacatgtgatatataatcaccctcagttacataacctcagccaagttatgttatctctcatcctattttcctcttcatggaagtagggacagtaaagagctttgaataagggcatgaatagggcaatgcctaagggtacctgttacccagcagcacttatgcagcaatggctgcttgttttgggcacatgtggacctaaggaagtaggtgtgagggatggtaagggtctggcctgcaggaatttgatccaggctggcctctcactggatgaatgaccttagccttcagtctcctcatcattagaacaggcttgttggattctatgttccctaaaattctaatcctttggctttctgtgactaataaggagagagtaagcagctacatggtctagctacataatgcctgtgccactgtggaaagcaagaaattgttgccaaaaaccagagacataggatttgtaataggaattaagggagacttcctcccctacaacattttattatggaaatttttaaatatacaacaaagtttgaagaatttaacaaggaactcctacctagattccatgatgagtctataaattcatctttcatttctgcattcatacatcgatccatctcattttttattaaagtttgattatataccataaaatgtgcccattttaaggtccagtttggtgaattgtggtaattgtatccagttgtgtaactactaccacagtcaaaaacagttcccatgccgtgcaaggcttcctcatgccaattcagagcagattccaagtcatgacagtggcatatgtagggaggaggcaacagagagagaggtgctggccaatggatggcctctagacagccagccccctggggccaacggcctatgagcttcgcttttgctgattgccacagggtgcacattagttcatccacagtagcaatgtcatgttctgccctaaaaggagacctcagggatctgagctcatgggcctcagaatgccccctcaccattattcctgctgaatcctgggaggggatgggcatccccttgaagcaactgtatcctctccccatgttgtgatgttccctgatgacagtccttcctttttgcccaccactagcccatgagaacctgctccccacatcattggtgatatcagtggctcaacacccaccgtcttctgcaccaccaggtagagctgtgtctttttgtattatgccttctgaaaaacttcattcatttgacaatgatggatagacagagaggcagaacagacagacaagcgggttgagaaacaaacggacaggtaggcagacaggtagatacaaaatcttatcagtattaggggtattccaggagtggatgactaatggcaacttctttgtacttaacagtgagtttttaagaatgcaatttgaataaattacaactgatagtggatggactctgtcatcttcatatacacagaagctccacgttggctcagattaattgggaaaactgaagcagtactttactcattactactagtgactgggcaaaagtcaaagctacagagcccacaactagccagagaaaaacgttctggctgatatcgcgtaagagctctttccaggccaggcgcggtggctcacgcctgtaatcccagcacttgggaggccgcggtgggtggatcatgaggtcaagagagcaagaccatcatggccaacatggtgaaaccccgtctctactcaaaatacaaaaattggctgggcatggtggcgcgtgcctgtagttccagctactcagaaggctgaggcaggagaataacttgaacccaggaggcggagccaagatcatgtgattgcactttagcctggtgacagagtgagactgtgtctaaaaaaaaaaaggaaaaaaaagagctctttccagcaagcccatgtagatggcagaattctcaaaagagatgagaaatgtttcaaaattcagatgcatttatcccttaatttctaagtttgcaaggctttttagactagttgataacttctgatatgtcctaagacataatcacaaagtaatgaccagtaaaatcctttttggaaaaagagtttttttaaaaaaagatgtgaattacaaaattagtaaactgaacaatcaaacaatcgaaattctaaaatatatttctgcatttagaaaaatctcggtgtggtggcattattaccaactcatctggagcgattaggaatcccccacagaatgaaatgcatgacaacatcacttgtgtgtgggaaatcaaggcaaatgcatctgatcatatactgctggcatttccacatcttgagtaagtcataagctgttactaatgtactttgtgtagctttttaactttcttattttgtttttgacagataataattatatatatgtatagggtaggatgtgtgttgtgacacatgtatacattgcagaatgattaagtcagtctaattaacatacccattgcctcacatacttaccatttctttgtgaaaagaacagttaaattctacttttctagcaattttggaacatacaatacattaccattgctaactacagtcaccatgacatgcaatgtatctgttaaacttattcctcctatctaactgaaactttgtaccctttgaccaaattctgtctctccatgcacctccacccttacccccaggctctgttaaccatcattctaccctctatttttatgagtttagctttctagattctgcctaaaagtgagatcatgcagtgtttgtctttccatgcctggcatatttcacttaacataatgtcctctagattcacccatgttgcaaatgacagaacatccttcttttttgaggctgaatagtattccacaggcatatacaccacatttcctttatccattcatccattgatgaacacatagattgttcccatatcttggctattgtgagtaatactgcagtaagcttgggagtacagatacctttttgacataccgattttaattcctttggatttgtacccagaactgggattgctgaatgatgtggtaggtctatttttagttttttgaggaacgtccaagctgttttccataatggctatactaattgacgtttccatcagcagtgtgtaaagattcccttttctccacatcattgacaacatttatctttcttctctttttataatagccattctgacagctgtggtgatatctcattttggttttaatttgcatttcactcatgattagtaatgttgggcatttttttcatatactcattagccatttctatgtctccttttgagaaatgtccattcatgtcctttgcccattttgtaatagagttatttggtttgttgttgttgttgttgttccaacaactgttgtatcaacagcttgttcctttttgttattgagaagtattccatttgtgtggatgtaccagggttagtttgatcatttccccactgaaggacacttgtgttgtttatagtctttcacttttacaaatcagtcttctatgaatgttcatacacagttttttgtgtgaatataagcttttgtttctctaggataaatcccaagagtacaattgctaggttgtacggtaagtacacatttagctttttaagaacataccaaactattttcctgagtgacgaccattacaaattctcaccaacaacatatgagagatccagtttctccacatctttgatagctagtatggggtattatattttagctatttgtaatttgcatcattcaaatcctatgtatcttttgtgaatttatacttaggtatttcttttattttttattttttggggtgattataaatgacactgtgttttccattttagtgtccacatgtttgttgctagtatagagaaatacaatgatttttatgagttttcatgaatttttaattaaaatgaaattgaccttttattcttcggataagtgtgtgtgcatgagagagaaaaagagcagagaaagagagatagagaaagagagagagagtgtgtgtgtgtgtgtattctggactgctggttacagatataaattctagggtaccccagacgtaataaatcaggaaattttagattttaatgttttaaatggtaattcactgatgacaaattcatggtgaattttttgtggaaatcagcccctacgaacaagttaaattatttattatgcttgaattttgtttaatcgaaatatggcttggaacagatggctcatcagattgaagcatgaaagtggtttttggattctagcactgggaacatctgaacaaaacatcagagtaaaaaacagtagctgacaaaatcagataacttccacagagcaagtggtacccactttcctctgggtgggtctactgccaaacacttgtaaatgcattatttacaacttggaaccacatcctactggcaggcccatgagaagcaagcagcctctcccttttcccgggcccctcaatcaccacatggtgaaactgccttgatttcccaggcccttcccttggccctaggctgtgaagtactctgccatcttgggctgcttccaggagcacatttcgtgccagcctcctctttcctcttccaattaaaatcccattcccttaaagcaatgtctcttagaaaaagtaggatcaaaggaacccatgctatgtttaaatgactgccacgcttttactctatcgccaacatctttgtagtaacaaagtgaagtatctgtctcacagcatgcctcaaatgtcttctaatgaggaaactgagaggcatccatggtgtttgcttccccagccttgactgcaccaatgaatattttgaaatcctggacggtccaccatcctcagtaaagtcattggggaggacctgctctggcttccaacacacctacatctcctcctccagctcaatgaccctcgtgtatttccgaagcttcaacaacctaggataaaacttcattgcttattattactctgcacccaaaggtaagaatagtggtaaagagcaacagttccagagctggactctctggctaggagcgagtcacagtcctatcacttactctgtgaccttgggcaagcaacttgacctctcccagcctcaattcctttcctgcataatggggacaacaaggaacccttactttctaggtttattgtaagggttacatgcaatgaggtaagtaaaacactttgcaaagtgatggcacgtcataaatgcttgataatgggctgctttatcatgagctttttccttttacatgaacatctcatcacagtcagcccattagaaagtcatttctgaagttattctgaatctagtactaggtaggtgttttaggacctgcagaagaaatcatagtctcagcctgagagaggctcatgtacaaccaagaggaagtttaaggcaaacacaaggggtatgcatagaggacaaatagaaacactagaagaaggcaaacaatagaacagataaatatacgagaatatactaaattgacatatgcatgcacctgtgcaaaagacattaggaaagagagagagtgctatataggttacaagtattaaggaaacattgaggggaaacggcttctaaagctggctaggctataggtagagaaagcgagatagcacatcaggtgaggtaacagcatggcctagagataggatatataaagtgtgtggcaagaaggcagatggactaagccaaaggtgcctgttgaagtgctgggtactcagggttaggcaataataacaacaacagtgatcaaaatgctcaaaatatcagctaacatttactgagtccctattacatgccaggcagcattttaagcacttcacatatgctatcctcacacagacccatggttcttccccttttacagatgaggaaactgagacttatgaggttcagtaattatccaaggttctacattattcaccactaaaagaaaacgggcagagctcatgaaactgcaaataactagtatccactttttccaagacattgttcaaaacagtctcttgtattttaccaagtgccaggttgactcactaagcaagctttggaaacatgctataaaacacaaaggagatgctctgtgcaccaaagtagatcatgaaaaatcaccgtaattgatgttaaatggctattgacgatgtatttccttgtacttgcagaggcagtgttgcagaccccacatctaatcagtgagtcacgttcatgctgttactcaaatttcacccctaatttcttcttgtgtcccctctcccagtgcttttactctcattatttgctctgtctctcatagatgattccaaattccctgtataaatcttctgtagatgagagattctgtctgcacagtttctgcacaaatatgatgcccatttacactggaaccaagttatgcctatcaacgattgagtctttgcatattgataattttttatttgatctccttttttgtgtttatcaaagccagtgactcacttaatcagatactcacttttagggaaagttaacaaagcagaagcaagcagaagaaacagctgttttccccaggacactgatagtgaatgtttgcatttttgcatagaatagcacaatctaaatattgttatatttatggtaactgagcagaaaaagagaattttttttttgaccccacatacctgagaaacataaagacacacgtgaaaacagagtttgatttgggagatcacatgttacaaagattacagggaaaaagaatcagccagaatcttggcatttactgaagactgatcccagaatgctgccctcttgacttgcccaagtcgtcccttcttaattatgggagtcttcttgtatccacagccatcccgacagcaacacccagaacagtaacagcaagagcaggtaagccctgaaatgcatttattcatttactgactgtgtcctttcctctcagcacctgcatttgtatcctcacctgtatctgcttcatgcacagaaactggaccaactgcaaatagtgcatctatttgcaaatgggacatttgattctgcccaaacttttagagacattcaaaacttttgggatcttttggctctagcatcccaggatgagtaaacttcattttttggtacctttcagagtcatcaaagcttgagcagcttacaagtactttctagtggggttctatctttccaccttatgaccagtactgatcatggttagctccccatcctcatcaccaatagactttagcaaagtaagtggagtgtcagagccatttcagaggcagtgagatagaatagcagagaaaaaattgtgaactttggaaccaggagaccggactttagatctgctgcttaccagttgtgggattgggagtgaatcactttgcttctccaactttcagtttcctcatagataaaattggtacaccaatactcttctgtttaccttcctgagttatgataaaggtggaggtgaacacacacacacacacacacacaccacactttctaaaatcacaaatcactgtgcaaattatttgtttttctgcacttagccaaaacaaatgggcacatacctctggaaaaatagatactcaattaatggacttttagtgctacagacaatcctaatggctttgcaacttccaactaagaggttgaatagttgaccaagtacaaggttctccactagtagtagtatggggtggggagctcaacactcatgggaagggtgcagtgcccccagaggacaacagtcaccagatctctctctgcaggggactggctggagctgcagctggtgggtggctctggccggtgctcaggacgcgtggagattctccaccagggcgcctggggcaccgtgtgtgatgacctgtgggacctgaacgaagctgaggttgtgtgccggcagcttgggtgtggtcgagccatgtctgcccttggaaaggcccactttggccccggctcaggagacatcttcctggacaacctccagtgcgctggtgtggagcgctacctgggccagtgcacccactcgggctggtcagagcacaactggccaccacgaggatgccagtgtcatctgctcaggtatcttctcccctctaatatgggcactgccagtcctagagtgcttcaaaatctccctgccagtgttcagagtcagcctggaacaaaaacagaatcctcaaacatttagcatttgatttttgctgtagcttttctaacttggttaaatagatgaggttttatccgctagcctccaatataaaacctcgttttctaatttggtagcaagtattaccaaaggtgtgtgtgctttactgaaatatgcaaataacatgtttaatggtgagaattttttaatgatgggaataaggagctcattgaaagaggcagcctgcagtagccaggctaggggagactttagagctaggaagacttgaatctggcttccagagcctgtgctgacacacagactgtatgtgagcaacacttaaactctctcttaaacatattggtaactcttattgccatgtcctcactcaatcaccacaccaaggaaatctgtgcactaacctgacttatttcaattggcttgtgacaatttttaaaatattttctgaattttcttgtgtataaacagctacgagtaagttagccacctctggaatgtctatcaataatcctttctgataatgagatgccttttggtaaactaacagctgtaatagctgatgtgatttgaaaaaatcagtaatcataactcaaaggaggagggtttgttgcacagagttgcccacatgagaagcaactcaattgcatgtcagtacctgctaaccgtgacctgtaatttgaagtgcatacttaaagacattgtcttatgtgttggtgcattcatttgtctatttaccttgtgacatcttatcatgggtgacatgtatcctagtgacagcctcctgggtatatgttattcccacgtctcaatcttccagaggatgattgtctaaatctgaggtccccccagagacaccaaaagtgaaacacctgctgcaaaattgatggtttaagtcagatcatcccaaatgtacctttgcatccggccatttttacataacttggtacaaaccaacaaccagagagaaacttactttcattatctacagatgaatctgcttctcccagtactatgttttttaaaaggactaatttttcccacatcagattaataaatgcgtataacaatggaactaaaaccttcatcttcagttattaaagtcaggatttccaaaaaatactgatatacttattctctctacaaacagatgctgaagaatcacttgctaacagtccaggtcagtcacaccttttgttgacgggagttaaatatcagctgttcttgattttgtccttaagctatttgttttttcagttttaagttcactctttatctaaactgcagggtttttcacaccactgatattctattagaaagtcttatttaaaaatacttttgattttttacatgtgatgatgatgatgatgtgtgtgtgtgtgtgtgtgtgtgtgtgaagtctatattttttggagatgcatgcagagtgaaacggtgtttcatggccttttcgcatacactattcctctggctcagggcactttttcagctcttcccctgactagctccttctcagtttttaaagaggtgtcctccagccctttcctctctattgtccccttcatagcatcctgtttttcccctctttggcccatttatcacagtatgcaatgatgcactgtggcagtgcctgcatttgactaataaatagactccaggctccctgaggacagaaatcacatccctggtttagagctgtatcatcagtgcctaacataaaagacaatcaataagtacttaaaatgaaattaaattgtctgaagaccccacaacctgcaactcaggaacacgtgagaaatctgaggaaaaagccccaaggctcaagactggggaatgtccctccctaaccctctctgagctggcactggtggacccaggcggggtcttttgggaaatcacatgctgtgtctctgtctgcagagggctggccggagctgaggctgatgggcggctcaggccggtgcttggggcgcgtggagattctccaccagggtgcctggggcaccgtgtgcgacgacctgtgggacctgaatgaagccaaggttgtgtgccggcagttggggtttgggcaggctgtttctggccctggcgaggcccactttggcccaggctcaggagacatcttcctggacaacctccagtgcactcgggtagagcactacctgggccagtgtacccacttgggctggtcagagcacaactgtggccaccacgaggatgccagtgtcatctgctcaggtaacatatcccctctcagccagtgatttctgatgctgcaattgtgacattttgaaattctgcatcctgggtggcattttcatccatccatccatgtgtctgcccgtttctgaagcatctccttgagacgccatgggcagctctggttgcacaggaaattactaattacttggcatgagcaccatctgggcattacaatgtagattctagggtcccacctccagagattatgactaagtaggaaaaagtctctggaatctgcatcttaacaagtggttcagggattctgcataagaagggacaaaggcaatccagccctggctgctatgggacagagttgacccagctgctgtcccccagcctcctaggccaaggactctgccagaggagggttgaagtagcccaaggggtaattccagtattctggtttcctataccttgtcaccccaaatagagtaacctgtcacctttatgcattcagatgcggaagacctacctccacccacacctccaggtatgtccatatttttttctaattcaggcaacttactactactactactactcataaaagcagcaaatacttataagtatttgctgtaataagtaataagtaagaaccaggcactgttctgagcccttcacatatataactctttcaatcccctcaatagccccttgaggcaggttcttggattattcatattttccagataacctgagacattgaaagttagcaaggtgcccagggctagccagggtatctgaacccaagctgtcgatgctcttggccattagccttatttacccattccttggctcagctacacaaagaccagggaaaactcgagtaaatgtggggagacgttttgctcagatcattgctaatcatcaggacaatcctgccaaaaggcattatctattatattttacagaagagaaaattgagacacagaaaggttaagtaactttctcaggatcactcagtaagttaatgacccaaattttgacactgatcagtctggccccaaagtcatgctcttagggatcttatgacttttacctcttttcaaagatcttacaaatgaattattgactaatattcatctgtaataaaaaccaaatattagaaaaatcagaccaactacatgcactgtgaattctgaaatgatgctgaaggtgattgaaaggtgatttcacagctgaggattagggagatcaaaaaacctaccgaagataacttgattagaaagtggcaggactggaatttacaaagccatctctcaccctttgaatgcacctggctgtcccctacacagcctcagtgaacacagataagccatcatccattggcagaagcatctctcttgggcacttgcctggagaagacctcgatgtgtcctggtgttcttgaaggaaggccagctttacccattggtaccatgagtgagaagggagggactgcctaaagttaaagggccatggttagggtcaagggcagtggatattccaatgaagatcatctgtagttttctcattttatggacagcagggaaatgagaaaaatgagattgagtgaaaggagccattctggttatctattgctcaccgaaacttagcaatataaagtaaccaccatttagatgtatgttatgtctttgagggtcaggaattcaggcagggctcagctgggagacccttctgctccacagagcattgagcagggttgctcaatggatttcatctgatgactggtctggagaattcaagacagcttcactcatatagttggtgccttggtgggatcagctggaaggaaaggctcagccacagccctcttcctttttaggtggtctcaggttacaagaagtctgactaccatgctgagagaccatgcacactcagacttctttttgtttgtttgtttgtttgtttttgagacagagtttcactctttcgccaaggctggagtggagtggtgctatctctgcttactgcaacctccgccccccaggttcaagcaattctcatgcctcagcttccagagtagctgggattataggcaccatgccctgctaatttttgtatttttagtagagacagggtttcaccatgttggccaggctggtctcaggtgatccacctgcctcagcctcccaaagtgctaggaatacaggcgtgaaccactgcacctggccacactcagacttcttgtaaggtgggttagggctccatgagcgagccagtgttcccagagatgggaggtggaagccaccagtctcttaaggtgcagagccactgccaccatattctgttggtcagagcagtcacagaacccacccaggttcaagggaggttacctagaccccaccttgtgacaggaggcatgtctaagaatttgtggccttctctaacctgccacagaaccatagaaaatattgactcagcaccttcagtgcagactcttctcagtttgcactaagtacattgatgtttctaaggaaaccctttacattttactgacttatagataagactaaatattttcatctggatgtcatcattttctgccttttttccctttcagattcttctacagcttctcaggatcacataaaaggtagccttttattttaaattgaaatgctcattccatgtcaagagaactattgtggcaaatgctgggcagtatgcccaggacatagcacaacagagcctggcacagtgtgggcaaggggtctgcttctctgctgccactctgtgtaatatagtctgtaaaaaatactgactttacaacaaaaggatcagactgggaagggggatgtgtatctgcccaggtcagacatctggcccatactcagccttccctctttgggtacagtcctatagaaggaaccagcccattatcccttgccacgtgtagagatttcagaaggtccaactcccagaggtttcagtgtcagcctgacctggcctcattattgtagcttataaatgtggtcagtgataaaactaccagatgaccaggagcatcatcgcttcctgccgtccatctcaggaaagacgaggaatctgtgggattctgggaggatcacaagttgtccaagaggaacagaaagtagaaaaattaagcaacttcatattttagggacaaggtcaataaagaatattgtactttcacatttcctccaaaataattttgtgtgaaatctgctttctttgtgtgaaatcctgttttaaatacatacatgtatgtgtgtgtatctatctatgctaatatgacaacatacatgaaactattagatttcactgttaccttgtttaacccttataaatccaaaatcctgcaagttccagtctcagactaaatatctgagttaaaggaaacataatctacccagcaaaagtgaggcagagtacttaaagaaggtgctggtcataacatcccctgccagatcagtgtccttttccctttacctacagttcatcagaacccaaagttgttctagaacctcttgctccccaaacctccccaaactctcccctttcccaagcacatgtggcctctgtttcttcatctctccttccagtctctcattactctgtccctccccagcaagcagaacccctactttagagagggggagaaaactgtaagcagaaaggacaaattgcacattttctttatcaggtgctgagagagagggaaaagcagggaacattcacacattaatactttttgcttcatcagaattagatttaatagactctccttcccaagaaacatttaagctaaaggtctgctcagacagcctgtgcatgcccacccaggccgattggcgcccaattctaccagaccactgcatgtaaactggtctttattaggattacacaatgatgccaaatggacacattctgacaccatttttcctgttgtttcaggaggaagtaactcttgtggaggggtcatttctagtctctctggctcattttctagtccacagtatccagaaaactacccaacagatatccagtgtgtttgggagatccacatgggtgcaaaatttcacatagaactcataattccaagtttgaagtaagaaaacttttaaagagaacgttctatgtaaataagaatattgatttgtgaaatcatattaaaggtatttcttttagtgggaaacatttaagagtgaaagcagaagcacccaacattctatagtttttccaagtcaaattttgggttagctttgtagcactatccaatgagttacttcttagttgaaaaattcagtaagtgatttattaacatattttgatagtgtttcttttttttctaaaaatgtcacaaaaatcctcaacagttttgcccttattgtacactgggtatcaatatttgtcctcttagactttcttatttgaatccaaattttaaacggtaagagaattttcatacacacattagccaactactccagctttgggtcctgcatcttctaaatgttttgcaaagtaagaggagacattaatgtcattgccttatctctgacataaagagaataaatgttcgaaagtcactgacatttttatctctatgacataaaataacagctgatgttttaatgctagcccagactttgtatgctttgtcatattccagggttatacagtccaaagatagacgtctttgtcatctccattagagatgaggagtctgaggctcagagaggataactaatttgcccaaggccaacccatctagatctgtctgatgtcaatgacccatctgttcaccaatatgtgggtctgtaaaagagtctgcatgaagcccttcttcttgtgcatgacacacatcgtgttacaaacacagcaagactgtagaattccatgatcattagctccaggcatgcactgaattgcgttccatcatgactgtaccacaaccatggattcagacatgcactaagccaaaaatgcctcaggatatatttgttgactaaaactttagggacacaattagccacaatgaggtaaggaccttgaacccacacctccaaattctattatgttatccattgtctgttccttcaaaattgcttccccttacctttctcgtgaataattgccatactattcttctatatcctgccaccacttttattttaaaatcaagttttttcctacccaagaattcgagtatggcaattattgtgaaacacagaagtaggaaaaatctggccgtgatgtctgttacatgctgatctttggggtgatctgactgttatgaatttagttgcagtgtaaattagtatttcctaatgtcctatgtaggttgtgattggccaaaaccattataatttttaaacttctgttatgagattgtagctgaaagccccacacattccttagccaaagaaaatagagttgtgataggtcatctgaaaaaattaattagtattttacatttcagtgtgcaatttaaatataatccaaatatgtaatctctatgattgtcacacttttttagcattaaattttaggaagtttctaatctgccactacccctccatgtctattcaccccaggttggaagatatccttggatgtccctatgactccgttgaaatcttcaatggtcccaggattgcctcgctctccatggggaagttctgtgcccctgaaactgtgatattcttctcctcctcacacatcatgacagtggtgttccaaagtgattctatgaaaaccaacactggcttttatgatcttttcaatgccattcctcagggtgaaagggagtcaggtaggaaacttcaagtagtttttggtggttaaaagacagaacagattctaacttcagagtctcctttgccagtagagccctaggattcagtcttttaagacccccacactagcttcattaaccctgctccatagctgctagattttcccaccatgaaggccacatgggaagctacaatgaggcagtcatgtgcattctgtgtgtgagtggccaggctgctactgcctgcagggaaaagctgggtgctatgaaccgtcctggggctgcatccaccctccacagcctcttggtaactgtccagagtgctgaaatgtggaagttcaacactcgtatgacaagactccacttcctccacgagctggcccattttataccttgcatacattgaaacctagtctcacccaaatgagagccttggggatacctgttagccatgaccctgcaggcagtcatgaccctgcaggcagtcattccaaagccaggtccaatttgcaccctgcaagcacactgcctgccaagtgtgagacttctgatgctgagaggcccctacagaaaccccagaaattcttttaggccaccagaaagccagatagtaagtccctggatgtggtttggggtttgcttgtatcggagtaagggaatttcttgtatatttcacccctaaagcaatgttcgaaactctgccctggcaaagcaaggtaagctccaacatttgaaatccagacactcattaactcaagaccaccatttagccatttaacaatagttacagaggtcctattatataccaggtccagttgtaagtgtgggagcatggtacagctccgtgccctcatggagtttatactctagtgtggacgtgggtaagtgagagaggatcaaaacacaagaaacaaggaaataaacaaactggttttggggtaaggatgataaaggacaggggtgaaggctgggaataaggagtcaggtgggagaatagagggtgcctgagtagagtaggtgctactatgggctggatgagaatggatggtatctctgaagacgtggcatgtgatgaatgacaaagaaaagcattacaggtggaggaaagacttgggcatgttgaagcaacagaaagaaggccaaagtgacagagccagtggacacagtaagggaaggctgtccttacagtgcctccagagatagcagataattcttttttttttttttttttttttgagacggagtttcgctctgtcgcccaggctggagtgcagtggcgcgatctcgactcactgcaagctccgcctcccgggttcacgccattctcctgcctcagcctcccgtgtagctgggactacaggcgcgcgccaccatgcccggctaatttttgtatttttagtagagacggggtttcaccgtgttagccaggatggtctcgatctcctgacctcgtgatccgcccgtctcggcctcccaaagtgctgggattacaggcgtgagccaccgcgcccggccaagatagcagataattctaatcggccacagcccttcagtccagatagagcattgccactgtgttctatgaagtcacagtcacccttgtggtccaggtgcgtttcaggggattaaatctacccttattcaagacacatataaaaaagcagctgggaacctgctctcctgtaacccagcattgtgacacaaaaaccatatgtcaagttctgcagtaaccctgacgtgctgggtgctgagcacactctcattggtagcatctcctccagatgctgctagagtccttattttacaggtgataaaactgagggtcagggagacagtcacttatcaaaatttacacaactaggaagccatagaacaaggattcaaacccacttcctatctcactctgaatcccttaagcctgattaaatcagttggctttaaggttttgctcttgtggttgccttagccacaaacacagaagccagaaatcacttgctacttaaaacttatcaaactcaaaaataaaattttgctctgtttagaagatggaccagagttgcggctggtgggtggctctggccagtgctcaggacatggggaggtcctacacaagggctcctggggcactgtgtgtgatgacctgtgggatctgaatgaagctgaggttgtgtgccagcagctcgggtgtggtaaggccattgctgctcctggaaaggcccactttggcccaggttctggagacatccttctagacaacattcagtgttcaggaagtgagaaccaccttggccagtggcccagctccggctggtcagaccacaaccgtggccaccatgaggatgccaatgttgtctgctcaggtggcctctccttccatgatagattccttctgatctttcacccaaagacatcctagtgatggatgaaggccatgcatgaagtggggccagggaattttgggacagtggcccaacagatgaatgtccctttggccaggtagacagagaatgctgtgagcctggctccattctgaggacaaacacagcagagccacacaattggctgcttctgttctctgcacctctcccatttctggaactgcttttccaggtctaaccatgccctcgtttttgtttatgtaacatacgacctgcctgcttgagaactgcccacactagaaagccaccatttctttgtcttcatagaatgtaatttagatttttctaaatttttcttgtatgcatgcagatgctggggactgggctccagatgtgattcctccacccccaggtaagtccaacactaaatttgcactatcttggcaaagttaaaaaaaaagtaacctctctcctgacctagacactggtcaacaatgactaggctggtgattcccaattctggctgcacaccagaatcactcagcaagcttttgaaattcctggtgcccaggctgcatccctgacctgtcaccttagagtctctgaggtcactcccagacatcagtgatatttgaagctccctgtgtcattccaatgtgcagccaaggttgagaactagtgcttaggcaaggagctaagagccatatttcccaaatggaatcacattcaaaactctcttctggtggcagagcaagggagggcaggaggagaaagactgagtcactatggctgagaagaaggtcgatagggagaagagagaccctggaaaggttgtctcttaggtacatgggttagaaaatgaaagtatgcaggaaagaaaagatacatcgagtgtcaaactgtctcccagtgagtcaagagcagactgctgatgagaagtaaaccatttagggctcttccgtggccctcctggcttagccaacacaacagagtggacttactggtaaactactcaaagtcagtgtgcagcagtgaccttctcccgaactcaagattctgaagtatgtggggtcctgcctcctgcagcctcctgcttcccagggatgggttctcagctgcccccttctctgctccctgggcccctgggccctgcccagcctcttccctaaccctgcccagtgactgatgccacactctgtccccagcaggggcctggacactaggaagctattgggatcaggggtgcattttgtggcatttcggggcccaacaaggtagatggcagctgtccgtaccctgggctggcagaaccatggcacatttgccaggacactctgtggaggtctcttgcccattccagtccaggtcccaagtacgtcccaagatggagacctccattccttgtgggttgcccagctgccatgggtcagggcagtaacctgtaggaaggggaaagtggtttccccacccctggccagggccccacattttcattttgcactgagactcacaaattatgtagctgctctggaggggaggcagagtgcacagaaccccttctcgggtttaacaagcagctacactctctttgattccctctggctttcttcctcttccccagtgaggagtctgttctggcctgggccctggaaggaggaaaagacagcaggaggagaggggatggttttcagttcatcaacagctctaggcccaagtccccttggagcctggggtttcaaacctcagaaagcctttctgtcttctttctgctgtaatatccattttctgaggcagaggtgcatagctggctggaaaaaagaaggggtcatgggattaaggaaactatggagggaaatacaaccacttatgtctaaatagtatcccactgtaagcatgaatcaaaaaaaattcttattgatagaacattatatacctaccaagacacaaaaatataaggcttttgccatttaatactctgagataaatatcacatatcaagcattttaacaaaagaaaattgcttctgagccactttaagttagtgaaaatgtattccagtgatatagtgcacttcttcaggcaaaggactgatgacaggttaagttgaccgtgtccatcactttcactgctctgcacattgctgcagtgctggccaaggagcaaaacaatggggataaaggaattctcaagtacatctgacatgtttgcttcaaattcctcccccaataaaccgttggtgtaaaatccaaacatttaacagcattctcatgatcaggctttcatagctgccctcccctcagcacctgctatgcagggggtattgaggacacacatagaatatagacgtgcagcaggccttctgtatccatgatcccacatctgtggattcaaccaactgtggatcaaaaatattcaggaagaagaatcaatagttacatctgtattgaacatgtacagactttttttcttgtctttattccctggacaatacagtgtaactactatttacatagtgttataatacattgtattaggtattataagtcatccagagattatttaaagtataatggaggatgagcataggttctatgcaaatactcctatgttgtatatgagacttgaggatccgcagattttgatatccttggggagtcttggaaccaatcccccatagacattgagggacaactgtgtatgccacatagaaatcaaagccaagaggaaacaataaaggaaaaagaagggaccttaaacactcattggacctccccattaaggtccgtatttctccaatggaacacttatccaacctgcctttctccaccctggctctcagatttctggtttttagttttctgaatttcagtgcttagtaaatttctataggcttagtggtatggtcataagcccagtgatgtcactgtaattcctagtaactggtcaacccaagtataacctgtggagtgtggaacctagcatatgagagaaaacaagtcatgtaactgtgtgtggttggtgatttcctcatgaatcagctgaaagaagggcagaggctccattccagatcagggagaaaagacaaatgagcatctacaccatttattaaaactcaagggtaataataggctcattcatttgtgcttaagtataagatggtttatgatgctaagctctctcctgattttctttggttttggtttttgcagatatcattcctccagcccctataccacaaggtaactctctttcattgaaagtgtaacctatacagtattaagttgcagagaattatttttgtaattcataaaagcagaatggacttctgtgcgcactggctaccacaggggcaatgggtgggatggagccctcacaaatgggtgggttatccacatctgagctgagctggtttgcatggcaggagacttgaggagagcatcaaagaaatacaggctgccctcactatacacatgctacatgcatgtgtcaaatcccatttccaatatcgcttacaatcaattgtagggtcgtgcctgtctgtcatgcatcttccatcctccctcatgccctctcagtggcacagtcactcacaccagccaagctacaactgtgtctacaccagcatgatcactccccatttagtgactccactgctgagcttgatggaattctggattctacatctggaaaaatgcaacgtgcatgcctagtgaaaccaaccaagggtctctcatctgcttttacaggaggaagtaactcttgtggaggagtgatttcaagtctctcaggttccttctccagcccttggtaccctacaaactaccccaccaacttggagtgcgtctgggtgatacacgtggctgagaaattccacatagaactgatgatcccaagcctgaagtaagcaacattttctttctttacttttaaggccagtttagatttgaatccatactttcctcaatgaggtaggcttttgtgggataaatcctttcacattttaggcgagaattgctctgatcatctgagctgtggagagttatttaatcagttagctcaacttcctgtgcaataagagaacactccatgggcctccctgacaccagcccgttgagctgtagctggggcaacccacacatgaagacctcaccccatcacttttaaccagttccgtttgagacacaggcttcctcctccatctgaacccagatctgttcttcttcatcctcatggtctgatcttcattcttccctctgatgctacacaaatctgcttcctgttctcttcaagaatttctatcacgtccttaccaagaattttcttgtacagattaaacagttaattcattcccccattatgcaccttgttcttcctacttctttctttaactgtcactcatttttaaggaatgtatcctattttaatgtacatttatatgcatgtaggtgtatatacacacacacacattttcatatatgcatacatatacatgaggaacacttaaacaaaaatattacttttcctgataatgtttaaccccggtttcatcttgctctactgcacctaggtcattctctcttccttactttgtcccacagtatgccccagacctctgccactgctttccatctgtcgtcattgaccacagcatttgagaatctgaatggttaaatgctgcttttaaaaatgtaaaatggtactcggtggcggaggggcgaacttcattggctttacttggtagctacatattttttgatagaaaagacataagctaatgtcaggggacattatgcagtaggagcaaaatgcatttatcattcattgattcaacatacatttattcctttgttcaacatacatttatctgttgaaagcaatgtgagaagagttggtaccatgtatttcagatctatgaaattcacagttctaatgttttagggcatagtttaattttatcacttctgggaaatggtgattccaaacagttgtaatggcccacatcccctgtaatgtcaaagttattgttctaacataagtttcgtactataattttggagtgcacaaattaaggagtttttaaggtgttgcccaaaaccagaccatagtggctgatttctgaattttgatgttaaaagcctagatttattgaaatttgcttttttgttactcagaagataaagttggttatcatttactatttattgttattccagttctcaactggaagtgattatatacccttacaagacatttggctaggtctggagacattttttactgttacaattagaaggcaccactgtcagctagtgggtggaggccagagatgcagctaagtgtcctgcagtgaacaagacagctcccccaactccttgtccagaaaagaattatccagcaccaaatatcaatactgctgagattgaaaaaccccgacttaccctgactcttactttcattttttaaaatagttcagcacctacaggaccttgcttcacgctcaatttgtaaaaattatatccatatttaaactattaggtaggggcaaaagtaactgcaggttttgacgttactcttaatgctgttttattcttgctaattaaagcatgtcctgttttctgatgaaatgatttctcaggttgcagtgtcagctgttactgccacactgttgtcaccttacacacaaatgtgatcacttactttaagaaaacaaaaataaaaatgggttattttaaggtacttggcttttacttcactggaacagatgtgttctgcaataagcaggttttcaaatgcagtatttagtttgtgtacaactgtaattatgtctatcttgtatatatcatgcaatgagaatgtatcatataggcatcaaaggctgcttactattgtttaaatccaaatatgtatctctcatacttgtatcatgttagatcaatgttgatgttctttcaacatgtatttattaagcctctactcaatttattgagcaggccctggactagaatcagactcatagtgccaaccaagaaagacgagatctctaccctcacagagtttatattctagatgatgagacaaatggtactcagataaaccaatgactcaatggacaatttcaactagtgataaattgaaaaatgctatgaagaaaaaaatatacatacatgataataggatagaaaataaagaaggagaagacagcaacaggtaggatggccagggtcagcttctctgatcatccaggttggatgaaacattcacgaaacacttggtttgaacagggcaggtcggagcattggtgggaggagtcaacagacccttggagctcttacaactgtcaccatttctgcctgctctgggtctcctggagagtttaactcaatgaggcactgttagatatttgccaccaccccagagagtggcaagatttgaattaaagagttgggggacacttgaggagacactcgaggtagagaggaagaggataggagagactgaaggccagaataccagaagttactgaaatagactgggtagaagatgagaacccaacagacctggggcagtcccagtaggaaaggacaggagggcagattcaataggtcaaatgatgagtagggggtgtagcagtgatgactgcagtttttggcgggatgctatgcaaaagatgactctaaaacatcttgcagatttccttggagatattaattttgtcttcatgtcctcagattagaggacatctatgggtgtccttacgactttatcgaagtgttcgatggacaacaggctgcctcactctccatgggcaggttttgtgctgggacagagctcacgttcctttcttcttcaaacatcatgaccacagtgttcagaagcaacgccatgatcaccaacacagggttttatgctctgtacaacaccgttcagcaagatgaaagggagaacggtaggtactctaacacataccatgggaggaagttagatctgatatatgatctttccttttaagagagaagatgctttctaaatctggccctcattaatgacatctggagtgacatccatgcagacactaaaagctccccacctcactctaaccctgctctgccactccctgtcacttttctccaccaaagcatcctggctgaagaaacagatggcctgaaatctcatagtttgcatcgactgtgtgtgtagatggatccaaaagacagcccccttcttctccaaagaagtaaaggaaaatgcaatagaaaaatcattctgggacaaaactatctcaactagccacctgcttcaagctgaatttaatacaaaaaccacctataacacttagaagctgtgtgccacatgccgagtgacatcagaggacagggctggggctataagggctgtgaggtttggaaccagggccctgggcagagcatggcagtgggtcacaggtgcccggatggaccaccaagcagaagctctgagccttttttcatcctggccctcagctcctggcccagctccacggcccattcaggggccttttggctccctccttgcactgaggtgactggtgtatgtccttgagataaatgcggttctgccctttatgagctgacacttactcagaggcgagactcacacatacacccaggaagaattagaaaaccaaaccaactgctccatgccaggggccgtccctggagccacagtttgccaaaaacaaaaaagataggaaggagggaaagggagggaagggaaggaaggaaggaagggaaagaaggaaggagagtgagggagaggaaggaaggagagtgagggagaggaaggaaggagagagagggagaggaaggaaggagagagagggagaggaagagagagagaaggaaaagagaaggaggagagagaaggaagaagaaagaataagaaggaagaaaagagatgacatcacgtctggcaacagaacagacacaagcatggtgatccagggcatctagtagttgtaaccaaagtaactcagggccatttttagatgccagattgtgtgcaggttctccgccaaacaagacgtggtacctttctgactgaagtaagcaagtctacctctctctcaggcttaggagaactgaagagagatgagctacccacaccttctatgtcttccactgcctctctgccttacctaggagcatctgctgctgtgagttacccaacctcaggtaatttgtgttgttttgaattgatgagctataacttgccccagcaaagccccctaggcagtagggtagttatttagggtccaaatgccctgggcttatcttcccagcctcttcatttactgtctgtgaggcctctagcaaatctctgagctgcttcctgcctacattttctcccctggatgaggatgaggaaatccagggggtttcactgtgtgaatatccagggcagcccttgcccagtagtgggcggggcatactactcacagagtcagccactatctctgaccctcacctcatccaatgtcaaagcctggcaggggtttatctctgggtactgccttcttcttgacagaattgttaagaatggagaagctgaaagcatcaagttatagtttgctcccagctctatttggccagtagtctttacacttccaattcaattcagccagcagctcttccacgacaggcccttagaagagtaaagtacaatatgcagagaggagctaggaaagagagaaatgaccccaagcacttagaagtagcaccagggtagcttatactgaacaacacaggcccccaaaggatgttttcttgaatttaaaacatatctattggccaggtgcagtgactcacgcctgtaatcccagcactttcggaagctgaggtgggctgatcacctgaggtcaggagtttgagaccagcctggccaacatggtgaaaccccgtctctactaaaaatacaaaaattagctgggcttggtggggcatgtctgtaatcccagctactcaggaggctgaggcaggaaaattgcttgaacccgggagatggaggttgcagtgagctgagatcatgccactgcactccagcctgagcagcagagcaagatttcatctcaaaaaaaataaaaataaaattaaaatatatgtattaaaaaaaaaagatcagccaccaagccacggttttcctgagcttatatttcctaacatgccagttgggtgatggaaggagtactgcccacagagaaaggccatgagaaggaaatcccattcagaaccagaaggtgtctgtagataatccacagagcggacagcccacccacgatggactgaaagttcgatgtttgacgtttacctaagatgtataattttccccttttgcagcatcttttccaaagccaacagaggtgcccacatggacaggtaaccgtttcttctcacttctctggccctccctctatgcagtttgaattcacaaacatcccagcaccggggaggaagcgtcctgacttccaccctcctccatggcctcaggctgccggaggaactgctggcaatgtccaggttcacctggaaaatctgtgattggaaagtgacaggaaagaagaggctgtgagatgtaagaatggctcttgggggctggtttggaagaggcccccaggaaggccaggttgcctgctcaccccaaatctccacacatccccacctgtgggctcaccttatctgtgttgcaagcacaaccagcttctgctcccttttataacattgtcctttgaacataggaggcagcctgcaatgatggctctttccaatccctggaatgtcttcacacataggttatgcctgatcccaggaataacagagatgggaggtattgttaccgtctcttgatcaacgtgtgcaagggcacatagaaactcacacccacacacatatacacacacacatacacacacacacagtgtatgcacgacagcttcttgtgaaaaatccaacacaccctgtgaatgtcagaaaccaagacttcaccacacacagggaaagaacagttatgcctttgggcaggccaggtccagccaatggcgaggaacaaccatttcttaaccaatcacaaaaaatacacagagtagtaccaaggcaaacatgaacaaaatgaaataaaggagggagtgggattcattatcctcaattatcagtgcacaattcccaggaaattgtggcttctctggtggcctttgtggatgtgacttcatgaggttgttctttggaatgtctgcaaggtctgggactgcggctggtgaacgggtccagcagatgtgagggccgagtcgaggtctaccatgccaatgcctggggcaccgtgtgtgatgacagctggtctatagaggatgcccacgtcgtctgcaggcagctgggctgtggcctggccgtgtctgccctcccaggagccagcttcagccctggatcaggcagcatcctccttgatgacgtcaactgcacgggaagggagtcctccctggggcagtgccctcacagaggttggtacacccacaactgtgggcaccatgaagatgctggcgtcatctgcttaggtgagtgaaggtccgccctgggccagtcttgcagctgcctggaccaagcccgagatcctcagatagagtctgaaaatgcctctgtgccttaaacctttccccacatgcagaacagtggatttctgctcagactctggaaaatatgaccagctgttcaatacatggtaaggtcccattcaacttgagtacctgcaaagttcaattaattgtaaaagaaagaaaatcatggcatttattccacggagttattgggaggattaattgaggcaacccatgtagaacatttagtcaagcatcagacaaaccataaatacacaaaaatattaccattttgttggtgttttagttactaaggcaaattctatcagcatcactacctcaaagtttgtagccaggttagacatcccacaacctacacctggctgtataaacccagaggggagaggcctggatgcttaagactggttgtttatacccagcttccttgagtcacatttaaactgaaacaatgatctttaaaccactctgccattccaatttctattattaaaccaccctcatttcctttatctctgcagattctgcagctgctggacatccaggtatctatgagtttgtgtccattttatttgctgactggtggctagccgtcacctctaattggtctcccaaccccagcctatgctgggtctcccttatgagctttaactttccttgacaatgctctgagctccagaccctttcaccctcccagaaggtgaagacccagggctgtttcccattcccttggctggatgtcagcaggttgatgtgtcatcccttccacagatgagagcatttcaacaggactctaagatacttgaaccaaagggttggttcatgcaacagacgccatgacaatccagagaaggcaggcggccataggggaaggagacctggggcagaagggcctgggggcaggagagcctggggcaggagagcctgggggcaggaaggcctgggggcaggagaccctgtgggcaaaagggctgggggcaggagggactgggggcaggagggactgggggcaggagaccctgggggcaggagaccctgggggcaggagagcctgggggcaggaagggctgggggcaggagggcctgggggcaggaagggcttgggggcaggagggcctgggggcaggagagcctgggggcaggaagggctgggagcaggagaccctgggggcaggagggcctgggggcaggaaggcctgggggtaggagagcctgggggcagtagagcctgggggcaggggagcctgggggcaggaagggctggggacaggagctgctcctctacctgcagccccacctgggtcccagcagcagctgctgaactctgtgattctgacaaggcacccctgtctatggggccaaatgttcacaatcccaacatgaatgttatttcttttattttcttattcttaatcagaataatacacacccatgtacagggtgctatcaaattttaagtggtagctattagataagagcctggatagggttgtttaaaggcagactcatacatgtgatttagatgatatttgagaagagtattaaatatcattgtgtgtgtttggaatgtaattatgctaactatttttcttttttacgccatagcttcttcaactcctggggagcacccaagcgattttcatctaagaggtactttccccattcttatattttgtaacagtttttctgaggctgagggtctgaccatttgtgactaatggaaatgtagcaaatgcgatttccctggccctggtgctgtgtgcaataagaactgtgctcatgagaggcaagctggtgacatggaggattctcgtggagtaggtgtctttccaagaagagagcccactcagccaccgccctctgcagcaacagcagcagcaggctactgctcctgcaggtccttctacaggggcctcgggaaccagccccagttcctggggatgcagatcctgagagtcagcttcatctgctttgggcgcaggggtccgtttcacttggtcaattttttacttgcttgtcacagtgatgttctatcttctgctgcttgattttccaatcccaaccaccttcatcatttctcaatccatactttacaattttctaaattcaagtaaagcaaaattaattttgtaccaagaatttcataatgttcttggagagacctgagttaggaatgcaaaatctgagctccaagcattcaactctatttcttggaatttttagaaaaaccacctggaaaatgacgctttttttttttttaatctgaagacttagtgttcagtgtttcaaacaagtcatggtgtgtcagcaaaacaactctgagttaaagtggcatcaaatgttcatcatccatccttgtagcttcaaatcccccaggtgaccatcagtgatgctaccctgacaaagttcagacagatgcttccaattactgtcagacagtgagggtcaccaccatgggagggaaaagtggtgcagagacattgtgtagtgtggggttaatcttttaaagtgctgatgtgcttgtgatgatggcttggttttccctttcagctgttgaagttgccccagcattgacagaaatgggccccagcattggtaatcctttgattgcttccctcaaacttcctaattattgaatctgtctaggggactccctgtaatgtcagtgcccacccagattcatgtctctccaggactgagaaaatacagagctgatacagagggagaggttacagaggtgactgccacttgtctaatctctggatcctgaaaaatgtttttaactgtgaacctgggccccagtaataatgaaataatgaaaggttgagtttgacatatccccatgctattgcctatcagtttgatggctcagcttcaaaacagatatttatccttatccgtgtaattgccatgtttctaatccaaagatgagaatgagggaacaaaatattggaaatcacaaatagcctcaaaaagtcagttaaggaatttgcaagcactagtttgacttagtcctatgggacccagaagcaggaagcaagagtgtctagagttttggaatttagagtgtgtattattttaagaactaaagaaaagtcccactagtgtctgccagaagagctgatcacattccagtgataacctctgggtctcccccagccttgcccattgtcaagttggcagatgagaggagccaatgcaaagggcacattgaagtctaccacaatggcacatgggggactgtgtgcgacaacctctggggcgtcaacgctgcccacatggtgtgccagcagctgggttgtgggaagggtgttggccaccccagggaatggccacttggttgcaggggtggggggtggcggcgtgggacacatcctcctggacgatgggcagtgtcaaggcatggagaccacactaggccagcgtggctatctgggtctgtccatccacaactgtggccaccatgaggatgctgggctcatctgcacagatactgacttccagctttctcctgaggctgccagagccatgactctcagtgggggacctggaaaccaatgtgaggaagtttgggtctcactggcatcctctaaacaaatgcccaaggtccactctcaacactgagctccctggggcaaaggatacataatgacatataatacaaccctgggtcagccccaagtccctcagccccacatcctgccctgatcttggttccggaggcctcttggctattctcagcttcccttaatttgttgatctacccagtgtttgactcaaggcctaatgagttcaccttaggtccctctgtctctgcagtcttcaaggaattaccagatcctttctgtgaactattcactagggtaatggcacttcctagactttgtcccaaagttgtctgttttgagctttaaagctgactttgcagtgctgctccaggaaattccatgaacaaaacccagatcttcccatctacatactgtgtgaaagcttcaacactatcttcttttggcctctctggtttgagatagtttcctttaaaaaaaaaatcagcccagtttgtgcattatctatgtttctttctcttgccaaaaaagcaaaatagaaaaggaaatgaaatgtaatattcactgcttagcttatcttaattttataggacaaagactacactaaaaggattgaattcatccatttatttaacaaatatttattgagcacttcatatgtgccaggcacaattctaggtgctgagaatgtagcaatgaacacaacagacaatcctgccctcatggagcttgcattccagtgggagggttagagtcatttgtgcatttaaactgtaatggataattaacaaaagtaaatgaatactgaatcaagggtcataatatgctttattatgttaaggaatcactttcctttagtgctcagacaacttagtattgtgttataatttggtgaaaatgggaaatcaacattagaaacctaaagtcagaattaggaaggctcctagtactttgccattctagaaatgatgtcctcttcagtgcttcagtgaaacagcctctctgatccatcccagggggttctcacaaccaataggtgtttctcactttctgccttttgcatccctgtcactctttcagtcttaacaaagaaacctttgtcatttttaattttacatctcaaaagttgttctgtatctaattttaatgtatctgagatataaatttttaaaattaaacaaacctaaattcctgtttgttttgcaatttcagcatcagctacagaaataaccacttcacctggtaattttagtttctttcttgctttctataaatcagatatgtgtagattgttttgcatatggttagggttggagtttatatctcatataaaattaaatatcagctcatgtcaatgtataagttgcttatatattcattaaatgaaggagtacattgacagagattgtgtgccttccatacatagcacataatatgtctagtttgtttcctctctctttggtgcaacagctggtctttgaaatcaagttttagtgactggcttcacttacatcctcatcagtgtccatacatttgggtgtccagtgagtctgggttttttttaacccccaaaccacaggacttcagatatctcaggcaaaactaccttaatctgcattttcagaaaataatggagtaccacatctctcgtgtgttccacattacagtacattaatctattgatatgcaaattttaaagaaggattcacacagctaagtaagttagggaaatgccatatccctctcttgaagattcactgcctattaacacattaaagtctctgacaagacctgtagtaagggatctttaaaaaaaacaaaaaaaaacttggtttaatccaatgattctcaaacttctttgaccactgaagactttcgagtggcaatgcagcctcctcgcaggatttggagccagagaacctgggattacgttctggctccagccttaaccaattaggtcacagcagtcaaatctcctcacctttcagagcctcagtttcttcatgtgtagaacaagaggatgaaaacagccacctcggaagcttgtcctggggactgagtggtcaggtcacacttgtgtaagaacacggtgatgggagcttcacagtcacctccttagggatgtgtgtgctgccgcctgctgagttccggcttggctccctaatgtaagcaacccatgtgtccttttataaaattccttcctctggacactttggggatcatcctaaggcttaagttaaccactgtttggctaaataagtgagtgaaataccaaatcaattcaagtcagctcaactcaagttttctctgaactgtccatatttccatggtccttatttccaaaaatctcaaagccttctgccagaattgatacacactaacctctaaggaaaatcaaacaaggaaacatgctgctcttttggtgattggatctgtgaaaattgtccaccagttctttcaggcaagaacaagtcatatggcaccatcacagtgtaacatttttctaaaagttggaagaaagcttagaggttgctcatactgcaagtcacaagtgggcagttttggcctgccatgtgtttggatgcagacaactcagttttacctatgcatgtttacattatttttaatcccacctcttaataatggaatatatcctacaaaaatccagattttcagctttgattgaaaaatctgagaatggtcaacgtgaatttcagcagggcaccaattggttggggctgagcaggaaatgactgcctcctttatatggcacatgctctttctcccatttcttcctggccgccgtgcatgtctaagcctatagacatctccgtttgcacgcttggtgcttctcaaaccttaatgtgtacatagctgtcatggagatcttgttaaaatacagattctggttctagtggatcctgagagcccatatttctaacaaggtgatacagatgctactcctccacggactagcccttcagatgtagtagctgaagctcagagatgcaaaggagcttgtccaaggtcacatactctgttccacaaagactagagactagaacccaagtctcttgagtcctagccccacgacccacctgccccattattaatccccttagcttaataaacagagaataggagaatgaaacaggaacatggctggggcataatttgtaaacagtgtgatttaaaaaaaaatctttaccaataaacttgattgacaaggatggcatttaactataattttctcttaacttttgcttgtcttgacagttcctgcttcaatttcagccacagattttgcccttacacctggtaacaagttttttcctagtatgtcctttattacctatattagggatattgctatgttgaaatttacctagctagtacaattataccactatttgtccaggagtcacttggctaaattaatcccctggaaaatagactagaacccagaaatagacagagtgcctcatgcgcccaaactgagatcctagcattcaagctcaagtgtttgaatacctacagaggtataccacagagcctgttactgagagcttgttcttactttctacacactcataacatctggctatctggtctccctgctgactatatattagtagagacaacaggctggggagggagtgcagggtgctaggaggtatagacctaatagagaagctacattggcaatggcaggaaatgctagcagatgctctgatagccatagaagggttcaaaaaaaaaaaagcattcagtgtcactttctaaatggagcaaaaatgcccacttatctcagcatcctttgagagagctctgtattgaatcctggaacaacaatgatactcttcctaatgagtccaagttcatgcaagttcaagtatgatcagtatctttttttttctttttttaatttttattttattattattatactttaagttttagggtacatgtgcacaatgtgctgattagttacatatgtatacatgtgccatgctggtgtgctgcacccgttaagttgtcatttagcattaggtatatcccctaatgctatccctccccactccccccaccccacaacagtccccagagtgtgatgttccccttcctgtgtccatgtgttctcattgttcaattcccacctatgagtgagaacatgcggtgtttggttttttgtccttgcgatagtttactgagaatgatgatttccaatttcatccatgtccctacaaaggacatgaactcatccttttttatggctgcatagtattccatggtgtatatgtgccacattttcttaatccagtctatcattgttggacatttgggttggttccaagtctttgctattgtgaataatgccacaataaacataagtgtgcatgtgtctttagagcagcatgatttatggtcattggggtatatacccagtaatgggatggctgggtcaaatggtatttctagttctagatccctgaggaatcgccacactgacttccacaatggttgaactagtttacagtcccaccaacagtgtaaaagtgttcctatttctccacatcctctccagcacctgttgtttcctgactttttaatgattgccattctaactggtgtgaggtggtatctcattgtggttttgatttgcatttctctgatggccagtgatgatgagcattttttcatgtgttttttggctgcataaatgtcttcttttgagaagtgtctgttcatgtccttcacccactttttgatggggttgtttgtttttttcttgtaaatttgtttgagttcattgtagattctggatattagccctttgtcagatgagtaggttgcaaaaattttctcccattttgtaggttgcctgttcactctgatggtggtttcttttgctgtgcagaagctctttagtttaattagatcccatttgtcaattttggcttttgttgccattgcttttggtgttttggacatgaagtccttgcccatgcctatgtcctgaatggtaatgcctgggttttcttctagggtttttatggttttaggtctaacgtttaaatctttaatccatcttgaattgatttttgtataaggtgtaaggaagggatccagtttcagctttctacatatggctagccagttttcccagcaccatttattaaatagggaatcctttccccattgcttgtttttctcaggtttgtcaaagatcagacagttgtagatatgtggcattatttctgagggctctgttctgttccattgatgtatatctctgttttggtaccagtaccatgctgttttggttactgtagccttgtagtatagtttgaagtcaggtagtgtgatgcctccagctttgttcttttggcttaggattgacttggcaatgcgggctcttttttggttccatatgaactttaaagtagttttttccagttctgtgaagaaagtcattggtagcttgatggggatggcattgaatctgtaaattaccttgggcagtatggtcattttcacgatattgattcttcctacccatgagcatggaatgttcttccatttgtttgtatcctcttttatttccttgagcagtggtttgtagttctccttgaataggtccttcaagtcccttgtaaggtggattcctaggtattttattctctttgaagcaattgtgaatgggagttcactcatgatttggctctctgtttgtctgttattggtgtataagaatgcttgtgatttttgtacattgatttggtatcctgagactttgctgaagttgtttatcagcttaaggagattttgggctgagacaatggggttttctagatatacaatcatgtcatctgcaaacagggacaatttgacttcctcttttcctaattgaatgccctttatttccttctcctgcctaattgccctggccagaacttccaacactatgttgaataggagtggtgagagagggcatccctgtcttgtgccagttttcaaagggaatgcttccagtttttgcccattcagtatgatattggctgtgggtttgtcataaatagttcttattattttgagatacatcccatcaatacgtaatttattgagagtttttagcatgaagggttgttgaattttgtcaaaggccttttctgcatctatggagataatcatgtggtttttgtcattggttctatttatatgctggattacatttattgatttgcttatattgaaccagccttgaatcccagggatgaagcccacttgatcatggtggataagctttttgatgtgctgctgcatttggtttgccagtattttattgaggatttttgcatcaatgttcatcaaggatattggtctaaaattctcttttttggttgtgtctctgcccggctttggtatcagaatgatgctggcctcataaaatgagttagggaggattccctctttttctattgattggaatagtttcagaaggaatggtaccagttcctccttgtacctctggtagaattcggctgtgaatccatctggtcctggactctttttggttggtaagctattgattattgccacaatttcagagcctgttattggtctattcagagattcaacttcttcctggtttagtcttgggaggatgtatgtgtcgaggaatttatccatttcttctagattttctagtttatttgcgtagaggtgtttgtagtattctgtgatggtagtttgtatttctgtgggatcggtggtgatatcccctttatcattttttattgtgtctatttgattcttctctcttttcttctttattagtcttgctagcggtctatcaattttgttgatcctttcaaaaaaccagctcctggattcattaattttttgaagggttttttgtgtctctaatcacaggatcaaattcacacataacaatattaactttaaatgtaaatggactaaatgctccaatcaaaagacacagactggcaaattggataaagagtcaagacccatcagcgtgctgtattcaggaaacacatctcacgtgcagagacacacataagctcaaaataaaaggatggaggaagatctaccaagcaaatggaaaacaaaaaaaggcaggagttgcaatcctagtctcggataaaacagactttaaaccaacaaagatcaaaagagacaaagaaggccattgcataatggtaaagggatcaattcaacaagaagagctaactatcctaaatatatatgcacccaatacaggagcacccagattcataaagcaagtccttagtgacctacaaagagacttagactcccacacaataataatgggaggctttaacaccccactgtcaacattagacagatcaacgagacagaaagttaacaaggatacccaggaattgaactcagctctgcaccaagcggatctaatagacatctgcagaactctccaccccaaatcaacagaatatacatttttttcagcaccacaccacacctattccaaaattgacaacatagttggaagtaaagctctcctcagcaaatgtaaaagaacagaaattataacaaactgtctctcagaccacagtgcaatcaaactagaactcaggattaagaaactcactcaaaaccactcaactacatggaaactgaacaacctgctcctgaatgactactgggtacataatgaaatgaaggcagaaataaagatgttctttgaaaccaacgagaacaaagacacaacataccagaatctctgggacacattcagagcagtgtgtagagggaaatttacagcacttaatgcccacaagagaaagcaggaaagatccaaaattgacaccctaacatcacaattaaaagaactagaaaagcaagagcaaacacattcaaaagctagcagaaggcaagaaataactaaaatcagagcagaactaaagcatcttttatttaaaagaacaggaaagcatgtttcagttcaggaaggatttaatttataacgtgcatatgtttttaattcaggaagatgggaatttgagagggtgtaaaacaactagtcatcataggtgaatttttctgacaacaaagcctcctagtaaatgagaccaaagtaaaggcagaactgtgtataatcagaaaatgaataaaaattttctgatcaattgactaacatttctgctcatgtttcatattcaggcataatttccacttcagaagaagtaactccttcacctggtaatgccctctgcccactgcactacaaatgtatgcaaatgggacaccaggatcacctctgtccaccactggggccaagactaggcaggcttgggggcggtgtggtatcaagttatcatcgtctttgagcagggtgcctcatccaggccagaccctctgcctggcatgaggtggtggttggaggatggtaagatagagagaggactttcctggctaggttcgatcacctgccatgggctctggtaccatcgtgcctctctccttcatagcacttgctacaattgcaattttacatttatttgtataatcacttgacctcatctgaatttcccatgacacagtcctgtctttgaggacagaaagaacctatgtagttttgttggctgttttactccagccctggcacagtccctggcacagaggagtgggcagtcaatatttgttaattaaatcaatgaagaccatgatttccgtgttctagggacacagagaagaaaacaaattaactatgaaacaaaatttgtttgccatttggtaggttttgaccaattaccttttctcatttccagtgtctttgaatactgctctaaccacctcaaaaggtaatttaagtgttattttgggttccatctggcttgctataattttttttgtttggttttccagtgaattgattaaacaactttttatgtcctggtcaaattctttcatttttagtcatcttttgagttttaaaatatgtttatattaaccttactcttaaaggccatctctgatcccctgatgatgatcagtgaattctgggcaactcagctcaatgcataagccaagggaaaaatttgttcaacccattaggccaagttgaatccatgaagacattcactgactggtagtctaaggcagggatcctcaacccccaggtcacagaccagtagggctctatagcctgttaggaactgggccacacagcaagaggtgaatgatgagcaagtgagcattaccacctgagctctgcctcctgccagatcagtggcagcattagattctcacgggagcacaaccctgttgtgaactgcacgtgtgagggatctaggttgagtgtaccttatgagaatctgactaatgcctgatgatctgaggtagaacagtttgatcttgaaaccatccaccatcctccccgccatctgtggaaaatttgtcttccacaaaacaatccctggtgtcaaaaaggttggggaccactggtctaaggtaatcacctacttgagtctgtggagagaacttctcctggagaccagccaccaagtggtgtttccagaatggaaagaagtcaagccatggttttccctgatcctccttgacgtttgccagcattcagtgaggatggccaaggcagtaagagatgcagagttgaccaagacagcaagtaacttgcctcttatacaacagatttggagtgatgctggttggaattatctgaggagtttctaatgtgactctgggttcgagaacttcacaagtagagtgtagagggatttgtgggtttttttttttttttgtgagggaagggggataataagagggtggtcttccctgctctaggtgttgaagcaaatgaggtataaaacatcagattcagcagcaaaatgaagcctttattactgataaagctggattggcgggaaacagtacaaaagacaaatggacctgccacccctccccactctcagctagatcttaggacagcccactagggaaagttccagtctgcagagctgaccctttcctgggtcactgccaccaatcatttgaaaggaggagaaaggccgggaaagcaagtacccactcacagaatctttgttagattaactccatgccactgagaaacctggcccatggctgtggccccccccagacagtcacctctacctccatgggaagaagtaacatgttggcaagaggaatggagacccacaagaaggaatggagggctggcttggaggcagtggggggtctggagatgccttgccacggctcctggctgcagagcaggaggacaagcctggcagtcactgatccaggacaccaccttcctgtctcctgcatcttgtagaggcatgtgtgcctgacgagacggtcttattgctcccttgtcctttgtgttcacctgcagcttccatctccactcccgtgacctccacaccaggtagaacactctgtctgctatcccatcagtgcctcttcttggagatctgtttatcaaaatgaaactcaaaaattttgtccccaacatagcctcagtaaaaacagaaacccaggagtcccctccactggtgtatgtctcttcttccttttatctctagagatctcttcaacctcagcagaagtgacctttccacctggtaaagtctcctttgtggtactgtttaagttaatgagactggcttcgtatgtgtcatgttctattcagaaaataagcctcagttatgatcatttttactgcagagtaaaactcaatgaaaagacacagctggccttcttccactcatgtttgtgtcctgctctctttgttaatacacagatgcatcttcaatctcagcagaagcggacacgccctctggtaatgttttctgcctgtcatatttccaaagttcaatatgatcaactttttccctttctctgtggcaaatcaacatatataggtactggctattctgtctatggtatgagcctcagtgtaaacagaaaccccagcatccttttcacagaaactgaggttcatgttctcttcatccatagacacaaaagtggcccccgcaccagggcacaccttctgcttgctgtactggttttgatcagatgtgcccatgggaggccagggctaggggttcacacttctcctgcttggcctgtgtgtgtcatgcactggtcttgatcagatgtgcccacgggaggccagggctgggggtccgcacctctcctgcttggcctgtgtgtgtcatgcactggtcttgatcagatgtgcccacgggaggccagggctgggggcctgcacctctcctgcttggcctgtgtgtgtcatgcactggtcttgatcagatgtgcccatgggaggccagggctgggggcccgcacctctcctgcttggcctgtgtgtgtcatgccctggtcttgatcagatgtgcccatgggaggccagggccgggggtccacatctctcctgcttggcctgtgtgtcatgcactggtcttgatcagatgtgcccatgggaggccagggccgggggtccccatctctcctgcttggcctgtgtgtatcatgcactggtcttgatcagatgtgctcatggaggccagggctgggggtctgcacctctcctgcttggccatatgtgtcatgtttcaggtgatgctttgacccagcaagcacacctgaacacacacatgaaaaaactgggttgtgatagtgttagttctatccatctgcccttatgttttccaccatgtagttggtcaaaccaaaacattcctctgcatttgcagatacgactcccactgcagctgaagccccttcttcaccaggtatgctctctgctccttgcaacagccctcatgagtggctttctcagaatgctcagcccagcaagagtttacacacccagaataaacacttctgtttctccaggtgaggtcaggggagaagagaggagaagtcaggggaggccactcaactccccagaggatttcaggccactcccctatcactagtcatgaaactgcacgcagtgaaggtggatgctggggacaggataaataggataaaatagcttaaaatctcaagtctagagtagggattcccaaatgcttatatgtgtgtgagcctcatgtggaacttgtgaaatgcaaattcagtggctctgggtggagcttttctaagaggctcccaggtgatgccgctgctgccggtcatggacccggttgggggagtaaggtgttgaaccaccaccctcattttggaggaaaatgaggcccaaagaaggaaaagatttgcctaaagtcacagagctagggcaaggcagagccaggtgtcctgacttctatccaaagtcctttctgctctcatgctctgctgatgaatccatctgtgtgattctcccaaatccctatgacattgacgtcttcagtaacaaggctctgctgctttcttctcttttatttattttcttttttcccccaagtcctgggtactttgaagacatatgggggtaaaattcaatgaaaccaaagttcagcactttcttttcacctatgtttaagtatggccggcctgccttcttgcctgcctgcctgccctccctccctccctccctccttccttccttccttccttccctccttccttccttccttttccttcctttctttctccctccctccttcgctttcctcctacctccatccctcatttcctcacttccttccttctcacccacaccatgactccacttttgccagaagattcctttgcttgtaattctcactggctcttgacatcacatgaggcaaccttttctctgtggatctggttgacggtaattgggttgctttggtcacagattaggtgacactcagagggttttacttcctttgtgaaggcatgacagcgaaatcacttcctgtttgctcgggaagggccaccttggagtgggagaaaaggtgtggtggccattaaacccttaccttccttccccttcatccctgattaaccacatggagcccgggtgaatgcgactcccacatgttatactcctgaaaggcaaagtgcttagaatacatgctttggagcctcacgggcttgaattgtggataacctgagcatgctataaaacccctgagtctccatttcctcatctctaaaataattgtcatgaggaccagagatgcaaattatctgacacattgtagatgttcaaaataagaattgtcaatctccctcacaaaatgccagcctctcgtactccagtttatgcctgaatgtgtaaatccacaagatcagtgcacgcggtggatttctactgcatatcacagatgaaataggctcgttttcatacacttatagtctacagtgtaaaatttcaatgaagccaaattttaatgctttcttttcaagagaatatttttttttgaagccacagatctaatttcgaccaaagtgacaccatcactctgtaacaatcttatgtctgttgctagattaatgcttcattttattatttgcactactatattctttcataaaatccattgctaatttttctaccaggctttcctctgtatatgttactatggaattacatctctcagatatgacctttttcttatctaaaaatatttcagaggaaactaacttgattttcttggcttcattttcagcccctataaaaatgttttctacaaaatatgtttttttaattcttcctttcaaaattcaatatatttataaagtttttttctgaccattgaatacattattttatatctggagaataaacaggatacagcactgcttattacatttatttatttatttatttatttatttattttgggatagggtcttgctctgttgccaaggctggagtgcggtggtgcaatcactgcagccttgacctcttgtgctcaagtgatcctcccacctcagcctcccgagtagctaggaacacaggtgtgcaccaccctgcagctatttttttacatttttttaatacatactggatctcgccatatcgcccaggctggtcttgagctcccggatgcaagtgattctcccacctcaacctcccaaagtgctgggattacaggtgtgagcgcaggcacctggccatttaatacattttgatggcaaaaaaagtaaaacttaatggataatatttctgcacccaaactaaagtaggaacttaaacaatgtattgctatctgaaattacagaaaatgtttggttctttttcaggtttgaatataaatatgaacacatatttttgaagtttattttttttcttatttacagttaaaatttcagttgatgaaaagatggtccctgtacttggtaatttttgtctctaaacactaaaatgatcataactctattaatactgttaggatcatatttatttttcatttaacttccttactctttacaggaaaattttatgagcttgtaggtgtgtatgtgcagacacaggtgtgtgtgtggatacacatgcactttgtgggttgaaatcccaaaattcactttccaaaaccttacccagaagatatttacccttattcatagttcaaacaagcatggttatcttgcttccaatattacagcaataaatatgatgaggagagtgaccagcctagaccagcatactacagtcacagagaaacagaagcctgtggtgtttaacattcactaagcatcttctatgtgtcaaacagagcagaaaattgaaagatgcagtcaccacaggctgatataaaggcaaatcattctacacatgtctgtgggcatgataccaccaacagaatatagattttattttttattctttttatttttcaaatcaacctttttgaagtataatttctatacaataaactgcatgcatccatgagttttgtctaacatacacaactgtgtagcgaccaccaccatcaggatagagagcatttccatcatcccaggaagttccctcatgccctttctcagtaaatctctcccaccttctccaggcaaacactgatctgccttctgtcactatagaataggtttgtttttctagaatgtcatataaatggaatcaaataacatgtgctgtcgtgtttctaactcctttcacttcaaatgtttttcagatccataaaggaacaaatgtattggtcatttgtgacttttttttactgcgcagtgttattccactgtgtgcctataccatgatttaccccttctcctgcagatgggcacctggatggtttctggatttgggctgttgtggaggcttctgctgtgtccaaatctttctgtggacatgcacattcgttcatcttgagtaaataccaaatggaagagctgggttgtacaatatggtttttagagcgaacgtatgagctcttcaccatcaagagtaaaagtaatttcactggatacatgtttgatgagtcaaggcagtgcctcgttttagaacaactgtctcctaaatatttggaagtgttttggttttttgttttgcctgtttgctttgttttctttgggtttttatatttttgcttgaagactaagttcttaggtacctggaaaactaggcttgcccacaaggaccattccttgagggcttcagataattaaggctttactgtatgagagaaagtgtgtgtgtgtgtgtgtgtgtgtgtgtgttggagaacaacaaaaccagaaacagttcgtattgcaaatagcaagtggcaccctgcgatcctgtccaggatggaaacctgacctcgagtttcttcccacctgaccgcttctctcaccatgcagagccgcccctgcgcctggcgggcgggcggagccgctgtgagggccgggtagagctgcggcaccagggcgtgtggggcacggtgtgcgacgaccactggaacatcaggaacgcccgtgtggtgtgccgcctcctgggttgcggccgtgctctgggcgccccgggccgcggccgctttggccagggcaccgggcccatcctgctggacgacgtgcgctgcaccggccacgagaacgcgctggagcgctgcacccactcgggctgggcccggcacaactgccagcaccgcgaggacgcgggcgtggtgtgcgcaggtatcgcgtcctctgcccaccctgcctttcctctcctcacattcctggggtccaaattcaccatcctggggatatcaggtgcggccagggtcccagatcctatggtaccgagggcatgttggttaggtacacttgctggtaaacgttttaatcatccaggcttgggggcgcactcgtcacttttgtccaactccacttcagctcagtattggttctgaaatacagttaaacgatgatggggtcaaaggaaggagtggcggtgtaacaaaatgactaaggccgtcgaacttgctgctgtttgtctacgatttgtccagtccctctttccatctcggaggagggcttcaagagcatagtcctggttagacactcctcctcacctggccctaaccctcagaagtcagaaagacaccccagggtgtccctggctcctctgatgtccctttcatccaagatttggcctatacctttcctggaatgtattttgtcacccaatatctgtctgggcattctgacttcaagaggttgactaccttctgtatggagcagtgcttctttatatgtgccctaaacttaccctaaacgtcaaggagttatggaattctaagatttgaaacacaagtctgagctcaacttgtctattccattcttagttttttatgggtaaatcaaaggaattgttgccattgcttttgcctttgtagatggtgccttgttttgcatagacatgggacccaactagaaaagctgtcagaggcccctgaagacagacatgaatcacacccagccaaggagtatgaatgtgtgctagggtcatggggccctcaccttccagatccttgttttgattatgtcagttcctggttccagctattcctgatgctgtcaggggaccgattctaaatgacgatccattttccattcttggattatataccaagtggatcctttggacattcactgaggggttaagtgaacttagctggccatgcttcctgggctgggtgttggctctggggtactgtcctgccttgcttctgagctggagaagactttgatatctgcaaattacatctttcccagcttgaggctccaagcgtgtcacgtgcttgggaaaggacaccaatcagtgttcatacacaggatagcattataaccttagaagccatgtgtctactattctcttgctccaataaatcttggaattgatgatatatgtattctcaactctagttcacacatgccaggctccagctccctcaggaggccctgggccctcctttcctttgcatgctctggaaaattctcatgccactgtaccccagctttagtagtgaaatcaaatgagcccattcccctacacttcatgtctactaccagctacattatcctcttgcagtgttccaacacagttgacatttgttttcatccttctctcaccaggtctggctgactctcttgtacctaaggacaatggtaaagtcttccctctagcgtctgaggctaaggatgctgatgggggagctgagagaacagccaagcaggggagaaagaacaggctgtgatggggacccgcttctgtgtttacactgagatctctggatttccacccactcgctgggttttaggaggttgggaaaaagcccctttgcacccaggctccctttcttcaacttacctccatacaaagacccagatagatcgtgttcaggtgcacagttctcaacatgagaaatgagccatgcatggaatgtgggctatgggtaggattccccatgggtgtggggtgacctcaaagccttcttggaaaagggttggtataagtaaaattaatgaaagtcaagtcaagggtgggatatgaggagagctgagccagctccagctcagggcattgttcatggtagtttaatgaagtaaagatatacacgcacccaggacctacatgaccagtgaaccagtttctctttgtgaggatttcttcatcttcccctcctgcagcccagctatcctgcttgcctcacctcttccaagccgtcattgaccgaggctatctccggaggctgggctactcctcctgggacatccacttaaatgatgagctatgtcgccccaaagtcatgggacgctgcctgatcttcaacattccctatggccactgtggcactatccagcaggtaggacacttcccaggtggtgctacccttctgcagatgaggcccaggtgaaaaatttgggaaattcaaccacctattaaaaatctgtgtaaggacagaggaaaagtgcaaaccataacttcatttctgagtttggtaagacagagagcagctcattagtttgtctgaaactttccttcctttggggaatttgggatacacaataacaagtattgagtgctgatgggctgatggatgtgtggatggatggatggatggatggatggtatattcttttcactccagaggcaatgtattttccacacatgcctcttgattgagcattggtgtacacctaccatgtgcaagctatggtgacaggcatgagggaagacagattgtccacttgcccatctgactgctaggtttctaagcaggtaactgcattccatgatcaagaaagcaaacctttaggacatttataaatcatgacatatatatgtttatttagttttccttgactactggtttatttcacaaaacaatggtattgaaattaaggaaacaagtacacgagagatatagggagagtgtataaccacagaatatttttttctcagtatttaaacaggataacctgttcccaagcaagatccccatactgcttctccattcttgtacatcccctgattagacacaaacatgaggccaggaaacccttggcattgttagaggttgaagtcattcacattttatctatttcattgtacagatcgtagtcattcctatcctttttgctttgacaattctactttttaacctcagaagtttctgccccaggatccatgccccctgtgtctgggaagtgggcaccctcagggaagcctctgggccatcagggaagaccctgcaaatgttctctttcgcctggctggctcagcttcccctgaaaaccccatgagctgaccagggtgctggggtagcagtcagcaggatcagagagcactgataaggaaaacactgctgcacagaggtccatgtctgctttcagagtcagtggatgggtcaccttctaggtgctggggacacagcagccgcaagactgacagagcccctggtccatggcccttacattcacgaaaagggggacaggatcagaccaaacacccaaaccagggtcctttttataccaaaagaggttacgaagacagtaaaacaagggaggggtagaagagtcatttggggtggaagggaagccgtgttgaataggctggtggctgggaagctgagcctgccctggggtggggcagccaggcagaggatgtggggatcagccagggctgaggtcctgaggcagccgcagccttggggctttcaagaagagactggaggccaggaagcccaagatcagagtggaagaagggcaggaccatgtgggtgaggagtttgacttttattctaagtcagagattctcaaggagggtaatgtcacccttatgggcagcagggaagatagatattggttcttagaggcaaaaattataatatctttctttctagctcaagcacagatacacatctggtatataaacactatacttgtattacaactcatagtcagggtttgagagaggccaggatgagtaagatgtctacaaaggctccttagtgggaccatggtggaagaaagttgacaaacattggtctaagctgacagggcagttcttggagtttccaagcagaatgtcacaggatctgagtcccacaagctgaggcttctttgaacaaatgttcccgggcaggctaagcctctaggcatctacacagggcatgagaggcagggacccctgcctgttggccccagcacaaccttacctcctgcaagtcctgttggatttgaaggctgggagtgaagttcagcagggccaggcccacagctcacatggagccagtactggtctggagtcaagggcaaggaagagaccaaagagaggacaagagctctggggatggtggggttggcctttgggagcctgcaggaatcgagcttgtgggggaattcagcagaaggggagctcagagcagctggacctgccaccccagctcacagctagcacaacagcttaatcctcacaggatggcagggacagtccagacttgcccactgggggctccctgcgtgcaccccacatgtcatgtcacccctttgtggtgttaagtatcacagaggtctggccccgggaggtcttccctcctgcaggtcagcaagctggtgccaagtggggtgggaaggagaggtctcagctcatggaggcaggtgcttgtcagggagccaagagtgctgcccacaactcttctctcatcctcacaggagcaccttggctccctcagctactctaactccatcagaggccggaaacggggccaccctggccgagtcattgtgcggcacaaggtgcccaagctgaagttcacctgtagggcggacggcccatccacagttgaaatcattcatggggatgacgccccaacagagggtgctggctacaccgtgtctatatccttcctccagtcccctgagtcccagcatgtgggaggcatggtgccctactatgacagccagaggaaagaggtcttcctccaagccaccctccacagccccaatcccaacctgatgctcttcgtggatacctgtgtggcttctcctgatccccatgattttacagccatcaagtatgatttgatccggcaggggtaaggaagatggaaggccctctggggtggactgttatattcacctgctgtgcctttagggaacctgtggcttctcaagtggtattcctacatcagaactttgtgcagactcctcactgtgtctcaggcacagtgggggccctcaacatcatctgatcacaagtggggacaaatagttataggcaggcagttatagacaccttcccttaactccccacagtcctagggagggctcttgctgccctgggctctgctgcctcacttcaccctttcatgtccatgcctcctttccttccagccccttccagccgtatgacttcactggactccccattcatagtgcaggccctcggggcattggcctacactgatgaactaataggttatcccaagctaagatcttagttatacttgtgagacttattctggctcctttggttaaccaaaagatttgccaagttagaacttcggccagttgtttgcgtttatagctctcttgtcccctaacagaggcaaagtgcttatagatgggcagttcgcaacaagtttgaaaacaacaaaaatccatcacttactactcaatggcagttttagagtggtgaggaccacggcaccctaaagtccatggagagcactgtggtacctgtttccaaaagccaggggacggacaggacacagcatcttccacaggcagtgtgagccatggtgtgagaggtgcacagaggtggcactaaactgcattgagccacagagtgagaaagctcttccctttcaaccccacttataaatatatcaggcaagaggctctgtttggtgccagaatttaacaacggacatttttttcttctgctttcttcagccttaatttgtgcttcttcctctagttttcaaagcttagactatagattttagatatttcttcttttctaaaatatgtgttttataaatttccctctaagcactgctttagctgcattccacaaatttttgataacttgtatattcattatcacttagctcaaaatattttttaatttctcttttgagatttatttgacccatgggttatttagaaatgttttgtttaatttccaaacatttgggaattttccaggaattgttcttattcaattttgagtttaattccacgattctgataatgtattttgtgtgatttttgttcttttaaatttgttaaggtgtcttttatggcccagaatgtggtctgtcctgatgaatattccatgtgggctcgagaagaatgtgtgttctgctgttgctggatggagggctctataaatgtcaatttgatctagtggattgggagtgctgtttaggtcatctatatcctcactgattttcttcatgctggatctgtcaactactgttggaggagttttgaagtatctggctattatagtggatttgttgattttctttgcagttctatctaaaactgtgttacgtgcttacataagaaaaattattgtgtcttcttggaggactgatcactttgttttcatataatacccctcttgcttcctgataattaccctggctctgaagtttattttcttctgaaattgatgtagctactccacctttcttttgattagtatttgcacggtatatctttcttcatctctttacttttaacttacctgtgtctttatatttaaagtgggttccttgtagacaataaatagttgggacttgttttttaatctactctgcttctaaattgctatatttagaccatttatatttaaagtgattcttgatatcattggattaaaatctaccatctcagtaactgttttctattagttgtatttgttccttgtttgtctcctcacactctttttgctgccttctccagttttaattgagcattttatgtgactcattttttctcctctgaatgcatcacttcttaattttttttttttggtggtttccctagggtttactgatgtacatttttaaataatccaagtttgccttcaaataaaaccaccaacacttttcatctctctttggacaaaacagagtaggccttttgaagacaagagttctacctagaatttaattactttttttttggttttattgtgtttattttctagttcctttctatttatgtccaggaatagtggtttttccactcatagcagtgttaaaaagtttctttatgaaagaaagagtgggtagtgggaagaactctatttgcaaatcagagatctgggtccatgcctgattatctgggttgcagtaaactcatatcgtgctttaagttaatctttttgtcctggggtttttctccccatcaggtgcatcaaagacaatacctacatcaacctccatccccgccagaagaacatggctcagttcaagttcaatgtcttcagctttcttgacagctatgatgtggtatatctgcagtgtaaggttgcagtgtgcaaggtgggggattatgcctctctctgctcctggggctgtacaggacagagtaggagaggtgcaggccccatggaggccaaggaaaagcagactgagcatttccaaatggtggggccactggagatccacaaagtcactgctcagaggaggactcttgagtgatttctgcaattttcatgtaaatctgtagaaagcaaagtctatttctcttcagtaatgtttgaccaatcagacgctatccgcatagagacaggtcaaagaaacagccagaggggattgcttctctgaggtttgttactaaacaaatcttctctgattactaaacttctaaggcaattactctctttgctgccacaaatgctacattttctaattcttgtcttaaagtgtacaaaatgttacaaagagcagggttatctctctataccgcattgtcaatttaaagattgtctttttaagttgactgtttaatcatcagatgctattaagtggatctctgtttttatcctctgacggtacgaggatttattttcaactcttgccaagagtcttaggtaaaataaaataagtgtctgtcactcattttttttaactccactcatttttttaaactctactcattttttaaaactctaactggttgcttgaatcaagcatgtcattcactcatcacaacaagctttgatcattttgttttgatgggaataaattggacctaggctttgttgggtttgggttatagcttgcaaatgaaaggctgaaatgcaatcacaggaaccatgtatctgctgtctgagctgctgatgcagggcaggcgagccccaaagtggagcttagcctgcgaggattcttggctttgcccacgaaagaattcaagagcaagctggaggtagaagaaaatagctttatcaaagaggcaatgttacagctccagcggtgttacagctctatgactgctcctgcagagcagggctaccctgtaggcaaaaagtagcagctcagggcagttttgcagtcatattaatattaatacttacttttaattgcatgcagattaagggttggtttatgcagaaatttctaggcaaggggtagtaacttttgagttagtgggtcattgacatggaaaggggcagtaactcccaggtgctgccgtggcaacagtaaattgacatggcacactggtgggcatgtctgattgaaagctgcttccaccccagccctgttttagttagtcctcaatttggtccggtgcctgagctcttcctctagagttgaaacccgcctcctacttcactaccaggtgtttgtgtggccatgttctcagtctgtttcccaaatcctcaaagcatttgggaaacttgaaaagtacacataaaacctgaaaagcaaacaaggaaagcttagcttattcctgcatcctcccagagaaggagagcagcatccactctcatctcactttctaccttaacaggaagagacctgtgctagactcactatccttgaaggtgtctttaaaaaaacagacttgaacatagtcagatttttatttttgcttgtcaagaaatattcagtagcaatatttaaaagataggtccccatctccaaggactagttcccctctttgtcaacaaatgacctgcacaggatgggactacagtattttcaagtcccccatggaggagggcagttttgggtagagcctaggagctaaccctgaggtcctcaaggttaaaaatctgataaatgacccaaggaggtgtgtagcctgtgagctgaacatctgtttcattacaaattttcccttcatcaacaactgtcttggtaaaatatactggtatttattttaatgaagttccctgcttatacacagaaattgatgaaatgtgattactggccagtttggtgaaaatgctatctttaaatcagagtcaattatttgtccctgagtagctccaactttagtcacatgaaacaatgattttagtatctgatgtgtatttcatgcaagtgcttcaaatgaataaaggagcttttccaagtaattgtaggctgctagagtttctactttcaaagtcatctccctattaactgtatatattcatagcccatagcatgttgaggaagtagaagataacagctaccaaaacctagcattttatgacttttaataaatccctaatatgaaacgtgttgacaatgaaagaactaacattttaataaacaagggtccaaacgaacttccagatcagttcctcttggtgtgtggttcaaaggatgggatccaggaagcaaccttctccaaaagcattccaggtgattctcagaaaggctgaagtttgaaagccatggccaccgttcagttttccacacctcatggatcaaaatgcacttcacagggaaaagcctgcaatcaggaaacaccaatggtacagaccaaaaagaaccaagaaaagcctgctctctctagccaaaggaccagcaaaggagcaacttagcaagacagaaaacacttagatgaaaactgtccgactctagctaactgccatgggaaacactgtggccccaccttcatcccagccagcaaatgttgagtggagagcctagacttctgacctcccccagcactccttctcttcccctccctcatcctgagtgatgtcagagaaggcaaagcgggcactgggatgctcatcacctccaggtagtaatgagaccctcacctccagccctcatgtcaggtgcagagcaggtagtgaggctagacttccatttttacccctacttggaagagatgaggcacccttttattctatcctggttagaggaggcccagtggagagccaggactttcaccccaacccagcagtaatgaggtgaccccccctgccttgggaaagcagaggtagcctggattccaccccaccccgcccctctagtttgcatgtgcctggtattccattgcgtatcccttcgtttttagcctctccaaaacactttgttaggtaagtcttttgaatacaacgtacagttactttgtaaaatattctgaaaagccatcccttttaggagttgagtagaatgaccactctaggggtgacacccagatgtcccctcagagaaagtcactcatatccagactgctgggagtgttggcggctggcggctctcagtgccaccgctcaccaggaatttccctcagctcaaggctttgtctaatccaagttcacagcccctcagtcctcaggcagccctcaggcaacgactgatccacagaagcatagacaggtctgagcaccttgcctcagtggggcacctctgaagggcagagcggccccaggacaccctgggggagtggctggaccctgctgctgctgcagctgcttctttgtgggccaactcccctgcttggttctgcttccctcctaggacacgggggctgatcccgagcacacgcctgaggaagcctcctgtacatcagcctctgcgtcagagtctgtttctcaggaacccaatctatgccaggtgtggcccaagcatattagaagcagattctagaacgggattttggagctggcagtgagaacttctcactgatggtaagtggaacatggatggctcctgactacaaacacattctctcttttttaatcctcaccacagccccggggggtggtagctgctaccaacccgtttattttatttttatttattttttttatttttttatttttatttttttttattatactttaagttttagggtacatgtgcacattgtgcaggttagttacatatgtatacatgtgccatgctggtgcgctgcacccactaactcgtcatctagcattcggtatatctcccagtgctatccctcccccctccccccaccccaccacagtccccagagtgtgatattccccttcctgtgaccatgtgatctcattgttcaattcccacctatgagtgagaatatgcggtgtttggttttttgttcttgcgatagtttactgagaatgatgatttccaatttcatccatgtccctacaaaggacatgaactcatcattttttatggctgcatagtattccatggtgtatatgtgccacattttaccaacccgttttaaattatggagaccaaggctgaaggtgacctagctcatgtaacccaccaggtaagtgagaagaactagaacccgggccacccactccagacctaggaacttttatcacttctctggagtcctttctaaacaaagaaaacttaaatagtagcatacatattgataatgcatatgcactgatattgcagatatacctcaatagctccactacaagtgatcttatgattcatggtaatatgattttacaccatctagtgagtcacaatatttgatcattttcgtagtgttacacttttgtgcctgatctgcatcggaatccctaccatgttggccagcagggaatgtccagtcagttctggatagagagatggctgaagggctgtgaccagaccagactgtttttaagcacttaacctgatttgcccattctaattaaatgtttaggggttttcacgttaggttaaaaaataactttacagtcgttcaacttaggctacctggatgaacatagaagagagtcactgtgtggctgcctgacaaagtattaatatttaggagattgacatggagatattgaaaagaaaatggggaagatctgctgtgatttggagctggaaaatcagtgtcctaagggcatgttctgtgagggcagagattctatcacatctcccgtgtattctcttcagcatcctgtagatgcaatgcatgttcagaaggaaaaatgcctttgggcatttgggaatgtggttacctgttgggatgcatgttacaacctgaaactatgtgtgttgttagatgatgagaaagagttgtgttgattgatcatctagggtgattagattctatgttttcatgtgtaaaatcagtgcacactggggtctttcattgtatttgttcagtcacagtaaatgggaaagtgtaaacccaaactggctactccttgaggacaatgaacctttggcttaggtgcttgatggtgaagggggaaaaaaaatgtttttatctcattaacccagaaacggtatgaagtctctcgttttatagtcacatttgtctatccaaagccctttcctgaaatgcttacagtgagaaatgctgaggctctgcatgaaagcaggaaggcatgtgaatcaaggagactgcggttctccttctcacactttagtttcagaaattctaacttttgatgtttcaaagagtagcatatttgcatctaaaaagtaaacacatctatctttgaaggctacttttcttaagtaaaaataacctttttcttttcacctaatatttggttaaaatgttttgtatttataaaaggaggtgttaattcgtgtaattttttgtttgtttgttttttttttttttacagagtttcactcttgttgcccaggccagagtgcaatggcgtgatcttggctcactgcaacctctgcctcccaggttcaagtgattctcctgcctcagcctaccaagtagctgggattacaggcatgtgtcaccacacccagctaatttctgtatttttagtagaaacggggtttctccatgttggtcaggctggtctccaactcctgacatcaggtgatccacccaccttggcctcccaaagtgctgagattataggcgtgagccactgcgcttggcctcatgtaatatttttgtatctttagttcgtaaaatgagagccaattgacgtggtatttatttccatcgtcttgtaatgaaacacaccgacacagtgacatgcaggcctgtgtgtcactttcaggcccttcctcatttattcataatatgtgtagccacgaggtagcatttcctttggcatcctggagaaacatgtctcacttagggttggacctgttagttaatagttctgcagcttctggtatttgtagtctgcccgttgatttacaaaatgcctcactgtgattgtcgctacagtcaccacattcagagctagaaccatgaaggaaaacagatgcacactgttgaaaggctggtttggagtttcttccgcatgtgtttcatgctgaaatcctaaaattggaaacaagatgaaaatcactttttaagaagtgttcacattataaaatgttggtagcttttataatacctgtacatatcctatgaatcttatatatgaattaatgtataatgcataatgccaacacaatatagaggaaccattatcaaatagttgaatttatttatatttatatttaattttgaacttgtttcaaattgttgacttggtttgatttctcggtatcacatgaaaaacgtgtaacactcaagcataacagtcaaatggaaatgcaggttcacttactaatggtcactgttgctcattgttgccaaaatacattttgtcaacagaaaaaaaaaatttgttcattcccttgaaataggaaaaagatacttttctcatattgatggtatttccataatgacttccatttataaattttcaactaatttcaaaccagcgtctatagatacactatgtaagccactagtgaatgcgtttataaaattactgaatttaacttttgtttttctgtttttgccatagaaatattttgctacaaaccagaaccatactcctttatagtgctaacaaaaatgaataaatacagagatcataaggtcctttaatgccatttacaactaaaataacttcttatagtttttctttcattaaggcttatcttaagccatttaattatgaaccttccttgagtatttaccatcattcctttcatgcatctgggcagatctcaggtttcaagcctttcaaaagaagcagggttagcctatgttaatataatagattctttgtctttttttttaataactttttttcaaataggctattatgtggaatgctggttcattttgttttactcatttaggagttaaaacacattgcttttgattcaattatctgctatgccatctataataaggagtcagaaaactaaaagaaacttgtttttagagatgaggacattacacttatactcaaaatccaaatgaataatggcaaactatcagtgtatcatctgcttacactgtacatggtatgcatattatcaactgatggaaataaatactaatcctatatacttaaaattcaacttatttgctaaagctactattataaatctctaaactgtacatgcttaagagttactggatttgagcagcattttatgagccatgatgtgcttttggatcatggaatagcttttttcttacctgaattgccacttgcacttcgatcccttttcagacgaatgggtcctatgatggaatctgttttccatttatatgaagaaatgtctcgtttgcttctggagacacaaccttgattgcagcgagactggtggtcactgctatcacatatcaaaactttacactgcagatacacagagctcatacttctcaagaatttaaaggcattaaactggaatctcccatagtgtccaaataagggatacaccttacaagtttcatctcgactacatctggaacagaatttatgaacatgtttagaagatacagacaaattcagtcttttccatactaaaaagttttctctcaactaagttgtgaatccaaaaatctctctcaaaagactgtctctagttcacactacagtgagttaagactatagacctgattcctgggtgagatagcaaggttctttctagctctaaaattcctggtccatataacttaatcagaaaaccaatacttacgtattggaagtcaaacttctttccttacgtgcttatcattaatgtatcagtacgaatgacgtagttaaaatccaacaaattgtaaggaaaaaaggaaattgttcctttcaaataagaacgttatactttttctcttaagaatgctacatatgttttactgatggcgttatattttaaagataacgcacatgaaataatcttctagatttttgttgaaaataaccaaaacgtacaaaaaccaaaacgcaaatagagcttttataacagaaaataaatttgtttctaccagcaaatattttgtgaatacacttaaaattctagatataagctgtgtctgcataaatgtttaaatttaaattattcataattagtacatagtaactattttataaaatgattagaataaatgtaatgaaatttcatgtagtgctaggaaaaatgtatatatacacaacacaaaaaattactttattgaaattattattccacaggaaggaatatcatacatacatcagttacattaatacatacccactcttgattaggtcgtaggttggagatgcaaagtcagaggtgggagaggctctacaggtatcaagaaacaccaccaaatttggatctgaggtgtgcagactaacttgaacaaaaagagtttggttcaaatccacataatatggtgattcaagtatagtcttttcaaatgaattggattcaaaaagagccatgctggtgttatatttgcccagtgcattttgactttgtattacatcatcttctgttatgtatattatctccactgtagaattatgtcccatttcacacttcacaataatctggagttgtttctgacgggtgatcacttcagaagttgaggatgcagaaaaggtgattatattggtgtaagtaattgactgatcttctacctgcagaacgagatagaattcaatttttatattttaagtccagtaatattttagagcatagatgtggataacatttgcaggtacagacataattttcttaaatcacgaggtaacagctttcatgtcagaatactataaaccttaaatgtatttcattgaagaaatattctaggaaagaaagtatgagatgagaaatacagcttgtattagaaagacctgaagatagaatcagacaatttttttcagttacagtaaaatccattttgattgcaaatttccagtcttaaaaagacattacaccttactatatattgctttccttaaagagctttaagttagtgtggctaactgggcagtttccaaaatatatgtagaccaagggtctgcaagaggaaggcccttagctgccttccctgggggttcacagtgtaataaagactgtgcgttcatttttggcaagatacgatgatttacttctgtctttatcaattcctctggattaacccccattcttttcaattaggttactgtttaatgtctgagtgaaaactttatagtatgtatcctaaagagaccaaaggttgaaaatgtttgaaatcttgaatgggacttctagaaaatggagaacaaatcacaaacttccagtaatatccttcatgtttaaatgggtttttttaaatgtttttttttcctgtctttaaaaggaaaagaagaagatcctaaaaatttagctagattttcactaaatacaaggtgtaaacattttctgcataagtgttactggtaggctattaagccaactgcatatagatgttcgaactctctttagtgagttttcagagttctttaccttctgggaaagataactatcccccacttatcctgaaaatgaatgcagcaatttggcagctatgtatgaatgggtatgtgcacttatatgtcttcacatgcttatcatgtggttaagccactaaaatttgggggtcgtttgttacagcagctagcaagcattaccctgactgcattgctcaacatgcactcagcatttgacaaaatccagctatcagtatttcactttacctttctgattgtaccacatccattaagagggacagaaaattccacaacatttgataattttggtctgcaagttgggtcttttagttgcaagttattcccattagagttaaaagcctctaggtaggatttgcttataataactctcatcctgtcagaagagcaagttaaagatgctgtcaggaaaaaaaaaaaaaaagaatggtcatgtttatgccagctaggaatgttggatcttgaagagctacgtgtgcaagtaaatatataaaaagtcaaaaccattttgccctaaacagtaatcataaatttgagatagccaagcaattgattcaccttttactgtgttcattgtgaccttgtttagagctagaatctgcaaacctgatgtttttaattgtgtctttgcagaaggaattaagggaaacagtccatattatctgcataaatctttttcaggttaataaaatcattaatttcctcttgcattaagcaatgcacagaaatgattgtcaagcttaagattatgaatatgttcccaactacatgtgacatgcttgcaaataggaatagccacaggtaggctaaaaattaacaatttctacatatgcaatcttcgaagagctcaaaatagctaagaatataaaacatgacttactagtgttgatgttttctgcataaattgaggtgtaggaagcagaaaatccccggtaagaattggcataatctgtagacaacacgacagtcagagagtttgatgacgattcgaaggtgggagtcacacggccacagacttgtccaatcaggccagagttggtggaggggccatcatagatggcaagaaaatcaaatttgcactgtttgtctatttctaggctagagaatgagggcctctggtgaaaaagagtttcaaaccaattcaattctattttctaacatcccaacaatcctactcttaagtgattatggattttttttttccttcaatggtatctcaggtttacgaagacaaacctggggttttgatagtctctgacaaggacctcagaatcttcagaaaaatagtcaacttagttcaatggaatagtatcactgttttcctttctacat

SEQ ID NO: 1066 - DNA, 7995 bp, Homo sapiens
tttatagcagcagcagaaatataccaccctagaggacacacctccttttagctaggtacctataaatgtccaggattttctattcaattgagaagaacccagcaaaatggggatctccacagtcatccttgaaatgtgtcttttatggggacaagttctatctacaggtgggtggatcccaaggactacagactacgcttcactgattccctcggaggtgcccttggatacaactgtagcagaaggatctgattctggtttggccctgaggctggtgaatggagatggcaggtgtcagggccgagtggagatcctataccgaggctcctggggcaccgtgtgtgatgacagctgggacaccaatgatgccaacgtggtctgtaggcagctgggttgtggctgggccatgtcagctccaggaaatgcctggtttggccagggctcaggacccattgccctggatgatgtgcgctgctcaggacacgaatcctacctgtggagctgcccccacaatggctggctctcccataactgtggccatggtgaagatgctggtgttatctgctcagaaagttggcctgtcaggatatcaccacctgtacccacagaagggatggatgaagggttcttgtgttcccctgtaggatctgaatccagtttggccctgaggctggtgaatggaggcgacaggtgtcgaggccgagtggaggtcctataccgaggctcctggggcaccgtgtgtgatgactactgggacaccaatgatgccaatgtggtctgcaggcagctgggctgtggctgggccatgtcagccccaggaaatgcccagtttggccagggctcaggacccattgtcctggatgatgtgcgctgctcaggacacgagtcctacctgtggagctgcccccacaatggctggctcacccacaactgtggccatagtgaagacgctggtgtcatctgctcagctccccagtcccggccgacacccagcccagatacttggccgacctcacatgcatcaacagcaggatctgaatccagtttggccctgaggctggtgaatggaggtgacaggtgtcagggccgagtggaggtcctataccgaggctcctggggcaccgtgtgtgatgatagctgggacaccagtgacgccaatgtggtctgccggcagctgggctgtggctgggccacgtcagccccaggaaatgcccggtttggccagggttcaggacccattgtcctggatgacgtgcgctgctcaggctatgagtcctacctgtggagctgcccccacaatggctggctctcccataactgtcagcacagtgaagacgctggtgtcatctgctcagctgcccactcctggtcgacgcccagtccagacacattgccgaccatcaccttgcctgcatcgacagtaggatctgaatccagtttggccctgaggctggtgaatggaggtgacaggtgtcagggccgagtggaggtcctataccaaggctcctggggcaccgtgtgcgatgacagctgggacaccaatgatgccaatgtcgtctgcaggcaactgggctgtggctgggccatgtcagccccaggaaatgcccggtttggtcagggctcaggacccattgtcctggatgatgtgcgctgctcaggacacgagtcttacctgtggagctgcccccacaatggctggctctcccacaactgtggccatagtgaagacgctggtgtcatctgctcaggatctgaatccagtttggccctgaggctggtgaatggaggtgacaggtgtcagggccgagtggaggtcctataccgaggctcctggggcaccgtgtgtgatgactactgggacaccaatgatgccaatgtggtttgcaggcagctgggctgtggctgggccacgtcagccccaggaaatgcccggtttggccagggttcaggacccattgtcctggatgatgtgcgctgctcaggacatgagtcctatctgtggagctgcccccacaatggctggctctcccacaactgtggccatcatgaagacgctggtgtcatctgctcaggatctgaatccactttggccctgagactggtgaatggaggtgacaggtgtcgaggccgagtggaggtcctataccaaggctcctggggcaccgtgtgtgatgactactgggacaccaatgatgccaacgtggtctgcaggcagctgggctgtggctgggccatgtcagccccaggaaatgcccagtttggccagggctcaggacccattgtcctggatgatgtgcgctgctcaggacacgagtcttacctgtggagctgcccccacaatggctggctctcccacaactgtggccatcatgaagatgctggtgtcatctgctcaggatctgaatccagtttggctctgaggctggtgaatggaggtgacaggtgtcgaggccgagtggaggtcctgtatcgaggctcctggggaaccgtgtgtgatgacagctgggacaccaatgatgccaatgtggtctgcaggcagctgggctgtggctgggccatgtcggccccaggaaatgcccggtttggccagggctcaggacccattgtcctggatgatgtgcgctgctcagggaatgagtcctacctgtggagctgcccccacaaaggctggctcacccacaactgtggccatcacgaagacgctggtgtcatctgctcagaatccaattctggtttggccctgaggctggtgaatggaggtgaccagtgtcagggccaggtggaggtcctgtaccaagtctcctggggcaccgtgtatgatgacaccaatgacgccaatgtggtctgcaggcagctgggccgtggctgggccgtggcattcccaggaaatgcctggtttgatcagggctcaggacccattgtcctggatgatgtgtgctgctcagggaatgagtcctaactgtggagctgcccgcacaatggctggctctcccacagctgtcagcacagtgaagatgctttaatgtgtctttcagatgccaccttgaggttggtcaatttaaattcatcctatggtctatgtgccgggcgtgtagaaatttaccatggtggcacctgggggacagtttgtgatgactcctggaccattcaggaagctgaggtggtctgcagacagctagggtgtggacgtgcagtttcagcccttggaaatgcatattttggctctggctctggccccatcaccctggacgatgtagagtgctcagggacggaatccactctctggcagtgccggaaccgaggctggttctcccacaactgtaatcatcgtgaagatgctggtgtcatctgctcagactggattgctgtgcaactcgtggaaggttctggaaggtgttcaggacgagtcgaggtgtattttgaaggcgtgtggggcatggtgtgcgatgacctgtgggatgagaaggaagtgcaggtggtgtgccggcagctgggctgtggggcagccatctctgcccctggagaggcccactttggccagggctccggccccattcttctggacgatgtgcagtgttccgggattgaggactacctggaggagtgctcccatgctggctggtccacccacaactgtgggcacggggaagacgctggtgtcatctgctcagactggccacaattgcaactagtgaatggctcaggtaggtgttcggggcatgtggaagttttccaccatggccagtggggcagggtttgcgacgaccagcgggacatgaatgaagctgacgtggtgtgccggcagctgcactgtgggtgtgccctcgcagcccctgctgaggcccaatttggcgaaggcagaggcgaatttctactggatgatgtggactgtactgggaaagagagttttttgggacaatgtcctcatgccggctggggcctgcataactgtggccccagagaagatgccagcatcatctgcgcagcctggatggaggtgaggctgctgaatggcacagggaggtgctcaggccgcgtggaggttcttgtccagggcacatggaggaccgtgtgttgcgtgacgacctctggaatctggccaaggccactgtcgtgtgccgccagctacagtgtggacgggctgtggcagccccaacaggggctcacttcggggcaggctctgggaaaatcctgctggatgacgtgcagtgtgtggggagcgagagccacctggggcagtgcgtgcatgggggccgggccaggcacaactgtgggcacctggaggatgccagtgtcatctgttcaggagcctggatggaggtgaggctgctgaacggcacaggaaggtgctcaggccgtgtggaagttctcgtccagggcacgtgggggaccgtgtgtgatgatctctgggacctggctgaggccactgtcgtgtgccgccagctgcagtgtggccaggctgtggcagcccccacaggggcccactttcgggcaggctctgggaagatcttactggatgacatgcagtgtgtgggcagtgagagccatctgggtcaatgcatgcgtggggaccaggccaggcacaactgtgggcacctggaggatgccagtgtcatctgcacaggagcctgcatggaggtgaggctgctgaatggcacagggaggtgcttaggccgcgtggaggttctcatccagggcacgtgggggacggtgtgtgaccacttctggaacctggccgaggccgccgttgtgtgccgccagctgcaatgtggccaggccatggcagcccacttcggggcaagctctgggaaagtcctgctggatgacatgcagtgtgtgggcagcaagagccacctggggcggtgcgtgcacaggggctgggccaggcacaactgtgggcacctggaggatgccagtgtcatctgtgcaggggactggctggagctgcagctggtgggtggctctggccggtgctcaggacgcgtggagattctccaccagggcgcctggggcaccgtgtgtgatgacctgtgggacctgaacgaagctgaggttgtgtgccggcagcttgggtgtggtcgagccatgtctgcccttggaaaggcccactttggccccggctcaggagacatcttcctggacaacctccagtgcgctgagggctggccggagctgaggctgatgggcggctcaggccggtgcttggggcgcgtggagattctccaccagggtgcctggggcaccgtgtgcgacgacctgtgggacctgaatgaagccaaggttgtgtgccggcagttggggtttgggcaggctgtttctggccctggcgaggcccactttggcccaggctcaggagacatcttcctggacaacctccagtgcactcgggtagagcactacctgggccagtgtacccacttgggctggtcagagcacaactgtggccaccacgaggatgccagtgtcatctgctcagaagatggaccagagttgcggctggtgggtggctctggccagtgctcaggacatggggaggtcctacacaagggctcctggggcactgtgtgtgatgacctgtgggatctgaatgaagctgaggttgtgtgccagcagctcgggtgtggtaaggccattgctgctcctggaaaggcccactttggcccaggttctggagacatccttctagacaacattcagtgttcaggaagtgagaaccaccttggccagtggcccagctccggctggtcagaccacaaccgtggccaccatgaggatgccaatgttgtctgctcagtgaaaccaaccaagggtctctcatctgcttttacaggaggaagtaactcttgtggaggagtgatttcaagtctctcaggttccttctccagcccttggtaccctacaaactaccccaccaacttggagtgcgtctgggtgatacacgtggctgagaaattccacatagaactgatgatcccaagcctgaaattagaggacatctatgggtgtccttacgactttatcgaagtgttcgatggacaacaggctgcctcactctccatgggcaggttttgtgctgggacagagctcacgttcctttcttcttcaaacatcatgaccacagtgttcagaagcaacgccatgatcaccaacacagggttttatgctctgtacaacaccgttcagcaagatgaaagggagaacggagccagcttcagccctggatcaggcagcatcctccttgatgacgtcaactgcacgggaagggagtcctccctggggcagtgccctcacagaggttggtacacccacaactgtgggcaccatgaagatgctggcgtcatctgcttagcaacagcagcagcaggctactgctcctgcaggtccttctacaggggcctcgggaaccagccccagttcctggggatgcagatcctgagagtcagcttcatctgctttgggcgcagggccttgcccattgtcaagttggcagatgagaggagccaatgcaaagggcacattgaagtctaccacaatggcacatgggggactgtgtgcgacaacctctggggcgtcaacgctgcccacatggtggaggccagggctgggggtctgcacctctcctgcttggccatatgtgtcatgtttcagatacgactcccactgcagctgaagccccttcttcaccaggtatgctctctgctccttgcaacagccctcatgagtggctttctcagaatgctcagcccagcaagagtttacacacccagaataaacacttctgtttctccaggaaaattttatgagcttgtaggatggaaacctgacctcgagtttcttcccacctgaccgcttctctcaccatgcagagccgcccctgcgcctggcgggcgggcggagccgctgtgagggccgggtagagctgcggcaccagggcgtgtggggcacggtgtgcgacgaccactggaacatcaggaacgcccgtgtgggcaccgggcccatcctgctggacgacgtgcgctgcaccggccacgagaacgcgctggagcgctgcacccactcgggctgggcccggcacaactgccagcaccgcgaggacgcgggcgtggtctggctgactctcttgtacctaaggacaatgcccagctatcctgcttgcctcacctcttccaagccgtcattgaccgaggctatctccggaggctgggctactcctcctgggacatccacttaaatgatgagctatgtcgccccaaagtcatgggacgctgcctgatcttcaacattccctatggccactgtggcactatccagcaggagcaccttggctccctcagctactctaactccatcagaggccggaaacggggccaccctggccgagtcattgtgcggcacaaggtgcccaagctgaagttcacctgtagggcggacggcccatccacagttgaaatcattcatggggatgacgccccaacagagggtgctggctacaccgtgtctatatccttcctccagtcccctgagtcccagcatgtgggaggcatggtgccctactatgacagccagaggaaagaggtcttcctccaagccaccctccacagccccaatcccaacctgatgctcttcgtggatacctgtgtggcttctcctgatccccatgattttacagccatcaagtatgatttgatccggcaggggtgcatcaaagacaatacctacatcaacctccatccccgccagaagaacatggctcagttcaagttcaatgtcttcagctttcttgacagctatgatgtggtatatctgcagtggcaggcgagccccaaagtggagcttagcctgcgaggattcttggctttgcccacgaaagaattcaagagcaagctggaggtagaagaaaatagctttatcaaagaggcaatgttacagctccagcggtgttacagctctatgactgctcctgcagagcagggctaccctgtaggcaaaaagtag

SEQ ID NO: 1067 - protein, 948 aa, Homo sapiens
MGISTVIMCLLWGQVLSTGGWIPRTTDYASLIPSEVPLDTTVAEGSDSGLALRLVNGDGRCQGRVEILYRGSWGTVCDDSWDTNDANVVCRQLGCGWAMSAPGNAWFGQGSGPIALDDVRCSGHESYLWSCPHNGWLSHNCGHGEDAGVICSESWPVRISPPVPTEGMDEGFLCSPVGSESSLALRLVNGGDRCRGRVEVLYRGSWGTVCDDYWDTNDANVVCRQLGCGWAMSAPGNAQFGQGSGPIVLDDVRCSGHESYLWSCPHNGWLTHNCGHSEDAGVICSAPQSRPTPSPDTWPTSHASTAGSESSLALRLVNGGDRCQGRVEVLYRGSWGTVCDDSWDTSDANVVCRQLGCGWATSAPGNARFGQGSGPIVLDDVRCSGYESYLWSCPHNGWLSHNCQHSEDAGVICSAAHSWSTPSPDTLPTITLPASTVGSESSLALRLVNGGDRCQGRVEVLYQGSWGTVCDDSWDTNDANVVCRQLGCGWAMSAPGNARFGQGSGPIVLDDVRCSGHESYLWSCPHNGWLSHNCGHSEDAGVICSGSESSLALRLVNGGDRCQGRVEVLYRGSWGTVCDDYWDTNDANVVCRQLGCGWATSAPGNARFGQGSGPIVLDDVRCSGHESYLWSCPHNGWLSHNCGHHEDAGVICSGSESTLALRLVNGGDRCRGRVEVLYQGSWGTVCDDYWDTNDANVVCRQLGCGWAMSAPGNAQFGQGSGPIVLDDVRCSGHESYLWSCPHNGWLSHNCGHHEDAGVICSGSESSLALRLVNGGDRCRGRVEVLYRGSWGTVCDDSWDTNDANVVCRQLGCGWAMSAPGNARFGQGSGPIVLDDVRCSGNESYLWSCPHKGWLTHNCGHHEDAGVICSESNSGLALRLVNGGDQCQGQVEVLYQVSWGTVYDDTNDANVVCRQLGRGWAVAFPGNAWFDQGSGPIVLDDVCCSGNES

SEQ ID NO: 1068 - DNA, 5428 bp, Homo sapiens
tttatagcagcagcagaaatataccaccctagaggacacacctccttttagctaggtacctataaatgtccaggattttctattcaattgagaagaacccagcaaaatggggatctccacagtcatccttgaaatgtgtcttttatggggacaagttctatctacaggtgggtggatcccaaggactacagactacgcttcactgattccctcggaggtgcccttggatacaactgtagcagaaggttctccatttccctcggagttgaccctggagtcaactgtagcagaaggttctccgatttccttggagtcaaccctggagtcaactgtagcagaaggttctctgattccctcagagtcaaccctggagtcaactgtagcagaaggatctgattctggtttggccctgaggctggtgaatggagatggcaggtgtcagggccgagtggagatcctataccgaggctcctggggcaccgtgtgtgatgacagctgggacaccaatgatgccaacgtggtctgtaggcagctgggttgtggctgggccatgtcagctccaggaaatgcctggtttggccagggctcaggacccattgccctggatgatgtgcgctgctcaggacacgaatcctacctgtggagctgcccccacaatggctggctctcccataactgtggccatggtgaagatgctggtgttatctgctcagctgcccagcctcagtcaacactcaggccagaaagttggcctgtcaggatatcaccacctgtacccacagaaggatctgaatccagtttggccctgaggctggtgaatggaggcgacaggtgtcgaggccgagtggaggtcctataccgaggctcctggggcaccgtgtgtgatgactactgggacaccaatgatgccaatgtggtctgcaggcagctgggctgtggctgggccatgtcagccccaggaaatgcccagtttggccagggctcaggacccattgtcctggatgatgtgcgctgctcaggacacgagtcctacctgtggagctgcccccacaatggctggctcacccacaactgtggccatagtgaagacgctggtgtcatctgctcagctccccagtcccggccgacacccagcccagatacttggccgacctcacatgcatcaacagcaggatctgaatccagtttggccctgaggctggtgaatggaggtgacaggtgtcagggccgagtggaggtcctataccgaggctcctggggcaccgtgtgtgatgatagctgggacaccagtgacgccaatgtggtctgccggcagctgggctgtggctgggccacgtcagccccaggaaatgcccggtttggccagggttcaggacccattgtcctggatgacgtgcgctgctcaggctatgagtcctacctgtggagctgcccccacaatggctggctctcccataactgtcagcacagtgaagacgctggtgtcatctgctcagctgcccactcctggtcgacgcccagtccagacacattgccgaccatcaccttgcctgcatcgacagtaggatctgaatccagtttggccctgaggctggtgaatggaggtgacaggtgtcagggccgagtggaggtcctataccaaggctcctggggcaccgtgtgcgatgacagctgggacaccaatgatgccaatgtcgtctgcaggcaactgggctgtggctgggccatgtcagccccaggaaatgcccggtttggtcagggctcaggacccattgtcctggatgatgtgcgctgctcaggacacgagtcttacctgtggagctgcccccacaatggctggctctcccacaactgtggccatagtgaagacgctggtgtcatctgctcagcttcccagtcccggccaacacctagtccagacacttggccaacctcacatgcatcaacagcaggaggatctgaatccagtttggccctgaggctggtgaatggaggtgacaggtgtcagggccgagtggaggtcctataccgaggctcctggggcaccgtgtgtgatgactactgggacaccaatgatgccaatgtggtttgcaggcagctgggctgtggctgggccacgtcagccccaggaaatgcccggtttggccagggttcaggacccattgtcctggatgatgtgcgctgctcaggacatgagtcctatctgtggagctgcccccacaatggctggctctcccacaactgtggccatcatgaagacgctggtgtcatctgctcagcttcccagtcccagccgacacccagcccagacacttggccaacctctcgtgcatcaacagcaggatctgaatccactttggccctgagactggtgaatggaggtgacaggtgtcgaggccgagtggaggtcctataccaaggctcctggggcaccgtgtgtgatgactactgggacaccaatgatgccaacgtggtctgcaggcagctgggctgtggctgggccatgtcagccccaggaaatgcccagtttggccagggctcaggacccattgtcctggatgatgtgcgctgctcaggacacgagtcttacctgtggagctgcccccacaatggctggctctcccacaactgtggccatcatgaagatgctggtgtcatctgctcagctgctcagtcccagtcaacgcccaggccagatacttggctgaccaccaacttaccggcattgacagtaggatctgaatccagtttggctctgaggctggtgaatggaggtgacaggtgtcgaggccgagtggaggtcctgtatcgaggctcctggggaaccgtgtgtgatgacagctgggacaccaatgatgccaatgtggtctgcaggcagctgggctgtggctgggccatgtcggccccaggaaatgcccggtttggccagggctcaggacccattgtcctggatgatgtgcgctgctcagggaatgagtcctacctgtggagctgcccccacaaaggctggctcacccacaactgtggccatcacgaagacgctggtgtcatctgctcagccacccaaataaattctactacgacagattggtggcatccaacaactacaaccactgcaagaccctcttcaaattgtggtggcttcttattctatgccagtgggacattctccagcccatcctaccctgcatactaccccaacaatgctaagtgtgtttgggaaatagaagtgaattctggttatcgcataaacctgggcttcagtaatctgaaattggaggcacaccataactgcagttttgattatgttgaaatctttgatggatcattgaatagcagtctcctgctggggaaaatctgtaatgataccaggcaaatatttacatcttcttacaaccgaatgaccattcactttcgaagtgacatcagtttccaaaacactggctttttggcttggtataactccttcccaagcgatgccaccttgaggttggtcaatttaaattcatcctatggtctatgtgccgggcgtgtagaaatttaccatggtggcacctgggggacagtttgtgatgactcctggaccattcaggaagctgaggtggtctgcagacagctagggtgtggacgtgcagtttcagcccttggaaatgcatattttggctctggctctggccccatcaccctggacgatgtagagtgctcagggacggaatccactctctggcagtgccggaaccgaggctggttctcccacaactgtaatcatcgtgaagatgctggtgtcatctgctcaggaaaccatctatcgacacctgctccttttctcaacatcacccgtccaaacacagattattcctgcggaggcttcctatcccaaccatcaggggacttttccagcccattctatcccgggaactatccaaacaatgccaagtgtgtgtgggacattgaggtgcaaaacaactaccgtgtgactgtgatcttcagagatgtccagcttgaaggtggctgcaactatgattatattgaagttttcgatggcccctaccgcagttcccctctcattgctcgagtttgtgatggggccagaggctccttcacttcttcctccaacttcatgtccattcgcttcatcagtgaccacagcatcacaaggagagggttccgggctgagtactactccagtccctccaatgacagcaccaacctgctctgtctgccaaatcacatgcaagccagtgtgagcaggagctatctccaatccttgggcttttctgccagtgaccttgtcatttccacctggaatggatactacgagtgtcggccccagataacgccgaacctggtgatattcacaattccctactcaggctgcggcaccttcaagcaggcagacaatgacaccatcgactattccaacttcctcacagcagctgtctcaggtggcatcatcaagaggaggacagacctccgtattcacgtcagctgcagaatgcttcagaacacctgggtcgacaccatgtacattgctaatgacaccatccacgttgctaataacaccatccaggtcgaggaagtccagtatggcaattttgacgtgaacatttccttttatacttcctcatctttcttgtatcctgtgaccagccgcccttactacgtggacctgaaccaggacttgtacgttcaggctgaaatcctccattctgatgctgtactgaccttgtttgtggacacctgcgtggcatcaccatactccaatgacttcacgtctttgacttatgatctaatccggagtggatgcgtgagggatgacacctacggaccctactcctcgccatctcttcgcattgcccgcttccggttcagggccttccacttcctgaaccgcttcccctccgtgtacctgcgttgtaaaatggtggtgtgcagagcgtatgacccctcttcccgctgctaccgaggctgtgtgttgaggtcgaagagggatgtgggctcctaccaggaaaaggtggacgtcgtcctgggtcccatccagctgcagacccccccacgccgagaagaggagcctcggtaggtggtcgctctcagaccccactgtccaccggggcgcagacccctgactcggggacttgggatgttcctcttggtgtcatattccaactcagattgagccctacattgtgctgcacctggtcatacggagttgaatcagacctggttcccgcctcccccaaggctcatggtccttggaggacccgttgcagggcgaggtcaagagagttctgacctggatggcccatagacctgacgtcccagaatccatgcttctcatctgcaaaatgaaaatgtcaatacttacttcttagcactgttgagagggttacttacataaaggaattttggtgaaactgcctcagcctgt

SEQ ID NO: 1069 - protein, 1649 aa, Homo sapiens
MGISTVIMCLLWGQVLSTGGWIPRTTDYASLIPSEVPLDTTVAEGSPFPSELTLESTVAEGSPISLESTLESTVAEGSLIPSESTLESTVAEGSDSGLALRLVNGDGRCQGRVEILYRGSWGTVCDDSWDTNDANVVCRQLGCGWAMSAPGNAWFGQGSGPIALDDVRCSGHESYLWSCPHNGWLSHNCGHGEDAGVICSAAQPQSTLRPESWPVRISPPVPTEGSESSLALRLVNGGDRCRGRVEVLYRGSWGTVCDDYWDTNDANVVCRQLGCGWAMSAPGNAQFGQGSGPIVLDDVRCSGHESYLWSCPHNGWLTHNCGHSEDAGVICSAPQSRPTPSPDTWPTSHASTAGSESSLALRLVNGGDRCQGRVEVLYRGSWGTVCDDSWDTSDANVVCRQLGCGWATSAPGNARFGQGSGPIVLDDVRCSGYESYLWSCPHNGWLSHNCQHSEDAGVICSAAHSWSTPSPDTLPTITLPASTVGSESSLALRLVNGGDRCQGRVEVLYQGSWGTVCDDSWDTNDANVVCRQLGCGWAMSAPGNARFGQGSGPIVLDDVRCSGHESYLWSCPHNGWLSHNCGHSEDAGVICSASQSRPTPSPDTWPTSHASTAGGSESSLALRLVNGGDRCQGRVEVLYRGSWGTVCDDYWDTNDANVVCRQLGCGWATSAPGNARFGQGSGPIVLDDVRCSGHESYLWSCPHNGWLSHNCGHHEDAGVICSASQSQPTPSPDTWPTSRASTAGSESTLALRLVNGGDRCRGRVEVLYQGSWGTVCDDYWDTNDANVVCRQLGCGWAMSAPGNAQFGQGSGPIVLDDVRCSGHESYLWSCPHNGWLSHNCGHHEDAGVICSAAQSQSTPRPDTWLTTNLPALTVGSESSLALRLVNGGDRCRGRVEVLYRGSWGTVCDDSWDTNDANVVCRQLGCGWAMSAPGNARFGQGSGPIVLDDVRCSGNESYLWSCPHKGWLTHNCGHHEDAGVICSATQINSTTTDWWHPTTTTTARPSSNCGGFLFYASGTFSSPSYPAYYPNNAKCVWEIEVNSGYRINLGFSNLKLEAHHNCSFDYVEIFDGSLNSSLLLGKICNDTRQIFTSSYNRMTIHFRSDISFQNTGFLAWYNSFPSDATLRLVNLNSSYGLCAGRVEIYHGGTWGTVCDDSWTIQEAEVVCRQLGCGRAVSALGNAYFGSGSGPITLDDVECSGTESTLWQCRNRGWFSHNCNHREDAGVICSGNHLSTPAPFLNIWNTDYSCGGFLSQPSGDFSSPFYPGNYPNNAKCVWDIEVQNNYRVTVIFRDVQLEGGCNYDYIEVFDGPYRSSPLIARVCDGRSFTSSSNFMSIRFISDHSITRRGFRAEYYSSPSNDSTNLLCLPNHMQASVSRSYLQSLGFSASDLVISTWNGYYECRPQITPNLVIFTIPYSGCGTFKQADNDTIDYSNFLTAAVSGGIIKRRTDLRIHVSCRMLQNTWVDTMYIANDTIHVANNTIQVEEVQYGNFDVNISFYTSSSFLYPVTSRPYYVDLNQDLYVQAEILHSDAVLTLFVDTCVDYSNDFTSLTYDLIRSGCVRDDTYGPYSSPSLRIARFRFRAFHFLNRFPSVYLRCKMVVCRAYDPSSRCYRGCVLRSKRDVGSYQEKVDVVLGPIQLQTPPRREEEPR

SEQ ID NO: 1070 - DNA, 5362 bp, Homo sapiens
tttatagcagcagcagaaatataccaccctagaggacacacctccttttagctaggtacctataaatgtccaggattttctattcaattgagaagaacccagcaaaatggggatctccacagtcatccttgaaatgtgtcttttatggggacaagttctatctacaggtgggtggatcccaaggactacagactacgcttcactgattccctcggaggtgcccttggatacaactgtagcagaaggttctccatttccctcggagttgaccctggagtcaactgtagcagaaggttctccgatttccttggagtcaaccctggagtcaactgtagcagaaggttctctgattccctcagagtcaaccctggagtcaactgtagcagaaggatctgattctggtttggccctgaggctggtgaatggagatggcaggtgtcagggccgagtggagatcctataccgaggctcctggggcaccgtgtgtgatgacagctgggacaccaatgatgccaacgtggtctgtaggcagctgggttgtggctgggccatgtcagctccaggaaatgcctggtttggccagggctcaggacccattgccctggatgatgtgcgctgctcaggacacgaatcctacctgtggagctgcccccacaatggctggctctcccataactgtggccatggtgaagatgctggtgttatctgctcagctgcccagcctcagtcaacactcaggccagaaagttggcctgtcaggatatcaccacctgtacccacagaaggatctgaatccagtttggccctgaggctggtgaatggaggcgacaggtgtcgaggccgagtggaggtcctataccgaggctcctggggcaccgtgtgtgatgactactgggacaccaatgatgccaatgtggtctgcaggcagctgggctgtggctgggccatgtcagccccaggaaatgcccagtttggccagggctcaggacccattgtcctggatgatgtgcgctgctcaggacacgagtcctacctgtggagctgcccccacaatggctggctcacccacaactgtggccatagtgaagacgctggtgtcatctgctcagctccccagtcccggccgacacccagcccaggatctgaatccagtttggccctgaggctggtgaatggaggtgacaggtgtcagggccgagtggaggtcctataccgaggctcctggggcaccgtgtgtgatgatagctgggacaccagtgacgccaatgtggtctgccggcagctgggctgtggctgggccacgtcagccccaggaaatgcccggtttggccagggttcaggacccattgtcctggatgacgtgcgctgctcaggctatgagtcctacctgtggagctgcccccacaatggctggctctcccataactgtcagcacagtgaagacgctggtgtcatctgctcagctgcccactcctggtcgacgcccagtccagacacattgccgaccatcaccttgcctgcatcgacagtaggatctgaatccagtttggccctgaggctggtgaatggaggtgacaggtgtcagggccgagtggaggtcctataccaaggctcctggggcaccgtgtgcgatgacagctgggacaccaatgatgccaatgtcgtctgcaggcaactgggctgtggctgggccatgtcagccccaggaaatgcccggtttggtcagggctcaggacccattgtcctggatgatgtgcgctgctcaggacacgagtcttacctgtggagctgcccccacaatggctggctctcccacaactgtggccatagtgaagacgctggtgtcatctgctcagcttcccagtcccggccaacacctagtccagacacttggccaacctcacatgcatcaacagcaggaggatctgaatccagtttggccctgaggctggtgaatggaggtgacaggtgtcagggccgagtggaggtcctataccgaggctcctggggcaccgtgtgtgatgactactgggacaccaatgatgccaatgtggtttgcaggcagctgggctgtggctgggccacgtcagccccaggaaatgcccggtttggccagggttcaggacccattgtcctggatgatgtgcgctgctcaggacatgagtcctatctgtggagctgcccccacaatggctggctctcccacaactgtggccatcatgaagacgctggtgtcatctgctcagcttcccagtcccagccgacacccagcccaggatctgaatccactttggccctgagactggtgaatggaggtgacaggtgtcgaggccgagtggaggtcctataccaaggctcctggggcaccgtgtgtgatgactactgggacaccaatgatgccaacgtggtctgcaggcagctgggctgtggctgggccatgtcagccccaggaaatgcccagtttggccagggctcaggacccattgtcctggatgatgtgcgctgctcaggacacgagtcttacctgtggagctgcccccacaatggctggctctcccacaactgtggccatcatgaagatgctggtgtcatctgctcagctgctcagtcccagtcaacgcccaggccagatacttggctgaccaccaacttaccggcattgacagtaggatctgaatccagtttggctctgaggctggtgaatggaggtgacaggtgtcgaggccgagtggaggtcctgtatcgaggctcctggggaaccgtgtgtgatgacagctgggacaccaatgatgccaatgtggtctgcaggcagctgggctgtggctgggccatgtcggccccaggaaatgcccggtttggccagggctcaggacccattgtcctggatgatgtgcgctgctcagggaatgagtcctacctgtggagctgcccccacaaaggctggctcacccacaactgtggccatcacgaagacgctggtgtcatctgctcagccacccaaataaattctactacgacagattggtggcatccaacaactacaaccactgcaagaccctcttcaaattgtggtggcttcttattctatgccagtgggacattctccagcccatcctaccctgcatactaccccaacaatgctaagtgtgtttgggaaatagaagtgaattctggttatcgcataaacctgggcttcagtaatctgaaattggaggcacaccataactgcagttttgattatgttgaaatctttgatggatcattgaatagcagtctcctgctggggaaaatctgtaatgataccaggcaaatatttacatcttcttacaaccgaatgaccattcactttcgaagtgacatcagtttccaaaacactggctttttggcttggtataactccttcccaagcgatgccaccttgaggttggtcaatttaaattcatcctatggtctatgtgccgggcgtgtagaaatttaccatggtggcacctgggggacagtttgtgatgactcctggaccattcaggaagctgaggtggtctgcagacagctagggtgtggacgtgcagtttcagcccttggaaatgcatattttggctctggctctggccccatcaccctggacgatgtagagtgctcagggacggaatccactctctggcagtgccggaaccgaggctggttctcccacaactgtaatcatcgtgaagatgctggtgtcatctgctcaggaaaccatctatcgacacctgctccttttctcaacatcacccgtccaaacacagattattcctgcggaggcttcctatcccaaccatcaggggacttttccagcccattctatcccgggaactatccaaacaatgccaagtgtgtgtgggacattgaggtgcaaaacaactaccgtgtgactgtgatcttcagagatgtccagcttgaaggtggctgcaactatgattatattgaagttttcgatggcccctaccgcagttcccctctcattgctcgagtttgtgatggggccagaggctccttcacttcttcctccaacttcatgtccattcgcttcatcagtgaccacagcatcacaaggagagggttccgggctgagtactactccagtccctccaatgacagcaccaacctgctctgtctgccaaatcacatgcaagccagtgtgagcaggagctatctccaatccttgggcttttctgccagtgaccttgtcatttccacctggaatggatactacgagtgtcggccccagataacgccgaacctggtgatattcacaattccctactcaggctgcggcaccttcaagcaggcagacaatgacaccatcgactattccaacttcctcacagcagctgtctcaggtggcatcatcaagaggaggacagacctccgtattcacgtcagctgcagaatgcttcagaacacctgggtcgacaccatgtacattgctaatgacaccatccacgttgctaataacaccatccaggtcgaggaagtccagtatggcaattttgacgtgaacatttccttttatacttcctcatctttcttgtatcctgtgaccagccgcccttactacgtggacctgaaccaggacttgtacgttcaggctgaaatcctccattctgatgctgtactgaccttgtttgtggacacctgcgtggcatcaccatactccaatgacttcacgtctttgacttatgatctaatccggagtggatgcgtgagggatgacacctacggaccctactcctcgccatctcttcgcattgcccgcttccggttcagggccttccacttcctgaaccgcttcccctccgtgtacctgcgttgtaaaatggtggtgtgcagagcgtatgacccctcttcccgctgctaccgaggctgtgtgttgaggtcgaagagggatgtgggctcctaccaggaaaaggtggacgtcgtcctgggtcccatccagctgcagacccccccacgccgagaagaggagcctcggtaggtggtcgctctcagaccccactgtccaccggggcgcagacccctgactcggggacttgggatgttcctcttggtgtcatattccaactcagattgagccctacattgtgctgcacctggtcatacggagttgaatcagacctggttcccgcctcccccaaggctcatggtccttggaggacccgttgcagggcgaggtcaagagagttctgacctggatggcccatagacctgacgtcccagaatccatgcttctcatctgcaaaatgaaaatgtcaatacttacttcttagcactgttgagagggttacttacataaaggaattttggtgaaactgcctcagcctgt

SEQ ID NO: 1071 - protein, 1627 aa, Homo sapiens
MGISTVIMCLLWGQVLSTGGWIPRTTDYASLIPSEVPLDTTVAEGSPFPSELTLESTVAEGSPISLESTLESTVAEGSLIPSESTLESTVAEGSDSGLALRLVNGDGRCQGRVEILYRGSWGTVCDDSWDTNDANVVCRQLGCGWAMSAPGNAWFGQGSGPIALDDVRCSGHESYLWSCPHNGWLSHNCGHGEDAGVICSAAQPQSTLRPESWPVRISPPVPTEGSESSLALRLVNGGDRCRGRVEVLYRGSWGTVCDDYWDTNDANVVCRQLGCGWAMSAPGNAQFGQGSGPIVLDDVRCSGHESYLWSCPHNGWLTHNCGHSEDAGVICSAPQSRPTPSPGSESSLALRLVNGGDRCQGRVEVLYRGSWGTVCDDSWDTSDANVVCRQLGCGWATSAPGNARFGQGSGPIVLDDVRCSGYESYLWSCPHNGWLSHNCQHSEDAGVICSAAHSWSTPSPDTLPTITLPASTVGSESSLALRLVNGGDRCQGRVEVLYQGSWGTVCDDSWDTNDANVVCRQLGCGWAMSAPGNARFGQGSGPIVLDDVRCSGHESYLWSCPHNGWLSHNCGHSEDAGVICSASQSRPTPSPDTWPTSHASTAGGSESSLALRLVNGGDRCQGRVEVLYRGSWGTVCDDYWDTNDANVVCRQLGCGWATSAPGNARFGQGSGPIVLDDVRCSGHESYLWSCPHNGWLSHNCGHHEDAGVICSASQSQPTPSPGSESTLALRLVNGGDRCRGRVEVLYQGSWGTVCDDYWDTNDANVVCRQLGCGWAMSAPGNAQFGQGSGPIVLDDVRCSGHESYLWSCPHNGWLSHNCGHHEDAGVICSAAQSQSTPRPDTWLTTNLPALTVGSESSLALRLVNGGDRCRGRVEVLYRGSWGTVCDDSWDTNDANVVCRQLGCGWAMSAPGNARFGQGSGPIVLDDVRCSGNESYLWSCPHKGWLTHNCGHHEDAGVICSATQINSTTTDWWHPTTTTTARPSSNCGGFLFYASGTFSSPSYPAYYPNNAKCVWEIEVNSGYRINLGFSNLKLEAHHNCSFDYVEIFDGSLNSSLLLGKICNDTRQIFTSSYNRMTIHFRSDISFQNTGFLAWYNSFPSDATLRLVNLNSSYGLCAGRVEIYHGGTWGTVCDDSWTIQEAEVVCRQLGCGRAVSALGNAYFGSGSGPITLDDVECSGTESTLWQCRNRGWFSHNCNHREDAGVICSGNHLSTPAPFLNIWNTDYSCGGFLSQPSGDFSSPFYPGNYPNNAKCVWDIEVQNNYRVTVIFRDVQLEGGCNYDYIEVFDGPYRSSPLIARVCDGRSFTSSSNFMSIRFISDHSITRRGFRAEYYSSPSNDSTNLLCLPNHMQASVSRSYLQSLGFSASDLVISTWNGYYECRPQITPNLVIFTIPYSGCGTFKQADNDTIDYSNFLTAAVSGGIIKRRTDLRIHVSCRMLQNTWVDTMYIANDTIHVANNTIQVEEVQYGNFDVNISFYTSSSFLYPVTSRPYYVDLNQDLYVQAEILHSDAVLTLFVDTCVDYSNDFTSLTYDLIRSGCVRDDTYGPYSSPSLRIARFRFRAFHFLNRFPSVYLRCKMVVCRAYDPSSRCYRGCVLRSKRDVGSYQEKVDVVLGPIQLQTPPRREEEPR

SEQ ID NO: 1072 - DNA, 5474 bp, Homo sapiens
tttatagcagcagcagaaatataccaccctagaggacacacctccttttagctaggtacctataaatgtccaggattttctattcaattgagaagaacccagcaaaatggggatctccacagtcatccttgaaatgtgtcttttatggggacaagttctatctacaggtgggtggatcccaaggactacagactacgcttcactgattccctcggaggtgcccttggatacaactgtagcagaaggttctccatttccctcggagttgaccctggagtcaactgtagcagaaggttctccgatttccttggagtcaaccctggagtcaactgtagcagaaggttctctgattccctcagagtcaaccctggagtcaactgtagcagaaggatctgattctggtttggccctgaggctggtgaatggagatggcaggtgtcagggccgagtggagatcctataccgaggctcctggggcaccgtgtgtgatgacagctgggacaccaatgatgccaacgtggtctgtaggcagctgggttgtggctgggccatgtcagctccaggaaatgcctggtttggccagggctcaggacccattgccctggatgatgtgcgctgctcaggacacgaatcctacctgtggagctgcccccacaatggctggctctcccataactgtggccatggtgaagatgctggtgttatctgctcagctgcccagcctcagtcaacactcaggccagaaagttggcctgtcaggatatcaccacctgtacccacagaaggatctgaatccagtttggccctgaggctggtgaatggaggcgacaggtgtcgaggccgagtggaggtcctataccgaggctcctggggcaccgtgtgtgatgactactgggacaccaatgatgccaatgtggtctgcaggcagctgggctgtggctgggccatgtcagccccaggaaatgcccagtttggccagggctcaggacccattgtcctggatgatgtgcgctgctcaggacacgagtcctacctgtggagctgcccccacaatggctggctcacccacaactgtggccatagtgaagacgctggtgtcatctgctcagctccccagtcccggccgacacccagcccagatacttggccgacctcacatgcatcaacagcaggatctgaatccagtttggccctgaggctggtgaatggaggtgacaggtgtcagggccgagtggaggtcctataccgaggctcctggggcaccgtgtgtgatgatagctgggacaccagtgacgccaatgtggtctgccggcagctgggctgtggctgggccacgtcagccccaggaaatgcccggtttggccagggttcaggacccattgtcctggatgacgtgcgctgctcaggctatgagtcctacctgtggagctgcccccacaatggctggctctcccataactgtcagcacagtgaagacgctggtgtcatctgctcagctgcccactcctggtcgacgcccagtccagacacattgccgaccatcaccttgcctgcatcgacagtaggatctgaatccagtttggccctgaggctggtgaatggaggtgacaggtgtcagggccgagtggaggtcctataccaaggctcctggggcaccgtgtgcgatgacagctgggacaccaatgatgccaatgtcgtctgcaggcaactgggctgtggctgggccatgtcagccccaggaaatgcccggtttggtcagggctcaggacccattgtcctggatgatgtgcgctgctcaggacacgagtcttacctgtggagctgcccccacaatggctggctctcccacaactgtggccatagtgaagacgctggtgtcatctgctcaggatctgaatccagtttggccctgaggctggtgaatggaggtgacaggtgtcagggccgagtggaggtcctataccgaggctcctggggcaccgtgtgtgatgactactgggacaccaatgatgccaatgtggtttgcaggcagctgggctgtggctgggccacgtcagccccaggaaatgcccggtttggccagggttcaggacccattgtcctggatgatgtgcgctgctcaggacatgagtcctatctgtggagctgcccccacaatggctggctctcccacaactgtggccatcatgaagacgctggtgtcatctgctcaggatctgaatccactttggccctgagactggtgaatggaggtgacaggtgtcgaggccgagtggaggtcctataccaaggctcctggggcaccgtgtgtgatgactactgggacaccaatgatgccaacgtggtctgcaggcagctgggctgtggctgggccatgtcagccccaggaaatgcccagtttggccagggctcaggacccattgtcctggatgatgtgcgctgctcaggacacgagtcttacctgtggagctgcccccacaatggctggctctcccacaactgtggccatcatgaagatgctggtgtcatctgctcagctgctcagtcccagtcaacgcccaggccagatacttggctgaccaccaacttaccggcattgacagtaggatctgaatccagtttggctctgaggctggtgaatggaggtgacaggtgtcgaggccgagtggaggtcctgtatcgaggctcctggggaaccgtgtgtgatgacagctgggacaccaatgatgccaatgtggtctgcaggcagctgggctgtggctgggccatgtcggccccaggaaatgcccggtttggccagggctcaggacccattgtcctggatgatgtgcgctgctcagggaatgagtcctacctgtggagctgcccccacaaaggctggctcacccacaactgtggccatcacgaagacgctggtgtcatctgctcagaatccaattctggtttggccctgaggctggtgaatggaggtgaccagtgtcagggccaggtggaggtcctgtaccaagtctcctggggcaccgtgtatgatgacaccaatgacgccaatgtggtctgcaggcagctgggccgtggctgggccgtggcattcccaggaaatgcctgccacccaaataaattctactacgacagattggtggcatccaacaactacaaccactgcaagaccctcttcaaattgtggtggcttcttattctatgccagtgggacattctccagcccatcctaccctgcatactaccccaacaatgctaagtgtgtttgggaaatagaagtgaattctggttatcgcataaacctgggcttcagtaatctgaaattggaggcacaccataactgcagttttgattatgttgaaatctttgatggatcattgaatagcagtctcctgctggggaaaatctgtaatgataccaggcaaatatttacatcttcttacaaccgaatgaccattcactttcgaagtgacatcagtttccaaaacactggctttttggcttggtataactccttcccaagcgatgccaccttgaggttggtcaatttaaattcatcctatggtctatgtgccgggcgtgtagaaatttaccatggtggcacctgggggacagtttgtgatgactcctggaccattcaggaagctgaggtggtctgcagacagctagggtgtggacgtgcagtttcagcccttggaaatgcatattttggctctggctctggccccatcaccctggacgatgtagagtgctcagggacggaatccactctctggcagtgccggaaccgaggctggttctcccacaactgtaatcatcgtgaagatgctggtgtcatctgctcaggaaaccatctatcgacacctgctccttttctcaacatcacccgtccaaacacagattattcctgcggaggcttcctatcccaaccatcaggggacttttccagcccattctatcccgggaactatccaaacaatgccaagtgtgtgtgggacattgaggtgcaaaacaactaccgtgtgactgtgatcttcagagatgtccagcttgaaggtggctgcaactatgattatattgaagttttcgatggcccctaccgcagttcccctctcattgctcgagtttgtgatggggccagaggctccttcacttcttcctccaacttcatgtccattcgcttcatcagtgaccacagcatcacaaggagagggttccgggctgagtactactccagtccctccaatgacagcaccaacctgctctgtctgccaaatcacatgcaagccagtgtgagcaggagctatctccaatccttgggcttttctgccagtgaccttgtcatttccacctggaatggatactacgagtgtcggccccagataacgccgaacctggtgatattcacaattccctactcaggctgcggcaccttcaagcaggcagacaatgacaccatcgactattccaacttcctcacagcagctgtctcaggtggcatcatcaagaggaggacagacctccgtattcacgtcagctgcagaatgcttcagaacacctgggtcgacaccatgtacattgctaatgacaccatccacgttgctaataacaccatccaggtcgaggaagtccagtatggcaattttgacgtgaacatttccttttatacttcctcatctttcttgtatcctgtgaccagccgcccttactacgtggacctgaaccaggacttgtacgttcaggctgaaatcctccattctgatgctgtactgaccttgtttgtggacacctgcgtggcatcaccatactccaatgacttcacgtctttgacttatgatctaatccggagtggatgcgtgagggatgacacctacggaccctactcctcgccatctcttcgcattgcccgcttccggttcagggccttccacttcctgaaccgcttcccctccgtgtacctgcgttgtaaaatggtggtgtgcagagcgtatgacccctcttcccgctgctaccgaggctgtgtgttgaggtcgaagagggatgtgggctcctaccaggaaaaggtggacgtcgtcctgggtcccatccagctgcagacccccccacgccgagaagaggagcctcggtaggtggtcgctctcagaccccactgtccaccggggcgcagacccctgactcggggacttgggatgttcctcttggtgtcatattccaactcagattgagccctacattgtgctgcacctggtcatacggagttgaatcagacctggttcccgcctcccccaaggctcatggtccttggaggacccgttgcagggcgaggtcaagagagttctgacctggatggcccatagacctgacgtcccagaatccatgcttctcatctgcaaaatgaaaatgtcaatacttacttcttagcactgttgagagggttacttacataaaggaattttggtgaaactgcctcagcctgt

SEQ ID NO: 1073 - protein, 1045 aa, Homo sapiens
MGISTVIMCLLWGQVLSTGGWIPRTTDYASLIPSEVPLDTTVAEGSPFPSELTLESTVAEGSPISLESTLESTVAEGSLIPSESTLESTVAEGSDSGLALRLVNGDGRCQGRVEILYRGSWGTVCDDSWDTNDANVVCRQLGCGWAMSAPGNAWFGQGSGPIALDDVRCSGHESYLWSCPHNGWLSHNCGHGEDAGVICSAAQPQSTLRPESWPVRISPPVPTEGSESSLALRLVNGGDRCRGRVEVLYRGSWGTVCDDYWDTNDANVVCRQLGCGWAMSAPGNAQFGQGSGPIVLDDVRCSGHESYLWSCPHNGWLTHNCGHSEDAGVICSAPQSRPTPSPDTWPTSHASTAGSESSLALRLVNGGDRCQGRVEVLYRGSWGTVCDDSWDTSDANVVCRQLGCGWATSAPGNARFGQGSGPIVLDDVRCSGYESYLWSCPHNGWLSHNCQHSEDAGVICSAAHSWSTPSPDTLPTITLPASTVGSESSLALRLVNGGDRCQGRVEVLYQGSWGTVCDDSWDTNDANVVCRQLGCGWAMSAPGNARFGQGSGPIVLDDVRCSGHESYLWSCPHNGWLSHNCGHSEDAGVICSGSESSLALRLVNGGDRCQGRVEVLYRGSWGTVCDDYWDTNDANVVCRQLGCGWATSAPGNARFGQGSGPIVLDDVRCSGHESYLWSCPHNGWLSHNCGHHEDAGVICSGSESTLALRLVNGGDRCRGRVEVLYQGSWGTVCDDYWDTNDANVVCRQLGCGWAMSAPGNAQFGQGSGPIVLDDVRCSGHESYLWSCPHNGWLSHNCGHHEDAGVICSAAQSQSTPRPDTWLTTNLPALTVGSESSLALRLVNGGDRCRGRVEVLYRGSWGTVCDDSWDTNDANVVCRQLGCGWAMSAPGNARFGQGSGPIVLDDVRCSGNESYLWSCPHKGWLTHNCGHHEDAGVICSESNSGLALRLVNGGDQCQGQVEVLYQVSWGTVYDDTNDANVVCRQLGRGWAVAFPGNACHPNKFYYDRLVNNYNHCKTLFKLWWLLILCQWDILQPILPCILPQQC

SEQ ID NO: 1074 - DNA, 100685 bp, Mus musculus
  misc_feature (1)...(100685): n = A,T,C or G
gaactgtgatggttgtcttggttgtcaacttgactccatctagaattaactaaggtcactaaagtggctgggcacaactgcaaagatttttttcttgattggatcattaaaagtgggaggacccaccctaaatccggaacataccttctgactaaatcagtggttctcaaccagtagatctagacccctttggggatagaatgactttttcacaggggtcccatatcagatagcctacatattagatatttacattacaattcataacagtagcaaaattacagttataaagtagcaacagaatgatttcatggtgctatgaggaactatgatagcagcattgggatggttgagaatcactcactggactatataaagggcatggaaaacaggagctcatgttctgcctgcttgtgcttactcttacttcactggcattagagcctacttcttcaggattctggtgtagcctgaagaccaactgaagcatccagcttatgaactgaacagctattggattcttggactttctgttgggagacagccactgttgcaatagtcagactacagcctgtaacccattctaataaattgacaggattcattcactcagttctgtgtctctagagaacgcagacgaatacagggacccactggaagaacatttgcaagagcatcaagtcctgcctttcactctagctgtttcacagacactgaaggtgagccagagggctaagtcactgaggaagaaaagtcgaggaggagaaagggaggcagaagctggcaatatgaatcctggctctttccacctctctgcagaggataacacaagcctgctcgcgtcatggaggagaacactatgcctaaagaatcacacagggaaatgacaagctgaggaactccgctgtgcctgcaaagccctctgctcaggcaaggggccctggtgccttttattagacagaagaccattctacaataaatactcttcacacaggccaaagaagttaccatggttggctctgtcccagcagagctgagtcagcaggaaatctgccaaggtgcagcaaaccccgtgtcttgtgggttccctgtgttgataatttttaaacccgaggctgagagcttgaatgccaaatgtgcagtagacgcaccgcccttgtgggccctaggtcctgtgaaggggtgagtagatgagtggatggtctagcagtcttgcaaaggggtcagagcaagtttcttattaatgaaataagtcaaagaatattaactcctcaggggtttgaggaccttgagatttcccaagcttcagatttgattttatctgtttatttattcacttgccatactggacattgacccctgaccttgaatatgtttggaaagtgtcctagcaatgagccatatcctcaatcctgcatggtatactgatgagctatggttttctgagtatgatgtctctcttatcttcctctggtgttaactttaccaaacagtgcactgggacttcctctatgaacctctgaatttatgaactagctcaaaggaccagagtgacaaaggaagagtttgtaaactgtaaagctctagagaaaacccaaacataattattttttggcatggggtaggctctgagcagctaagggaccttgtttctctatcaggacttcatagaaaggggctatgtccatgggatgggtcttgttcacaattaatacttgagaattacccaagagctaggggtgcagctcaggtggtagcatgtatgcatagcatgtgtgaactaggtagggtgaggtggtgcatatttgtaatccagctcttgggaggtaaagtcaggaggatcagaatttcaagatcattctagactataaagccagtttgaggtcaacctagtccctatttttaaaaaaatcaaagaaacaatcagtctgtctgtctacctatctacctccttaccttcgtacctacatcccagtagtctctgtgagtatagttctcaaattttccatcaccttttcagttctctgactgaactgcaagaagaaataactttttttttataactgcctagtggttaggctctatcccagcctcaggagggaaaacttgttaggctagttgaggataagaagtgtaggtgggctcagtgtggcagcctatgcctttaatcctagctcttgctctacatagcaggctgaagggcagccaccgatacatagtgagactctgtggaacataaagaggaggaggaggaggaggaggaggaggaggaagaggaggnnnnnnnnnnnnnnnnnnnngaggaagtagtagtgtaggcacatgtcagtgtcagtgggtctaatacaagttatagtcatctggtaagaggaaacctcaaccaagcaaacatccctataagacttgactgtaagcaagcctgtgggatatttagttgagggatgtggaatggcccaacccattgtgggcactgtcatccttgggcaaatggcagtggggtgtataagaaagtgaactgatcaggttaggaggagcaagttgctttgggttggtcttttatcacagtaatagaagctgtaactaagaagagtggcagagtggccaggaatgagtccaaccttgtctttctgaaatgcagacccctggttgctgaggccttccccccactctccagctcccctccaggctaacaccctccctgttcctgtgtatcacactcaccagctaagatgccacagggctggtgggggccatagggcttacctagtccttgggggtggagcttaggggatgtatggatgagcttttaaagatgattattgatacatgcattgagaaattatcttttcagcagaatccttaggatttaatttggattttgtttcattggtttggtgagacattattcagtccaggctggctttgaacttacaacaattctgtctcagtcttcgagctgctgggattacaagcacgtacaatctcctgagaaatcttagaaagttttcccagtgagaaaccccacggggctctggctcttgccctccagtccttgctcacagccctgttctaatgtaacgtctttgtttacttttcagtctgtttattttgcgaaacttttaaatagtaaatgatagtgctctttttatttcagagaaaacaaattatcctttatggatactgttgaagatctcctcatagtggattatttcccaacagaaatgaagctagagatgccttggaaacgtctgccctccagcctaagccaactttccccattcccagcagctgcacagctctctctgcctgtacttttggctaggaatgtcttcctgagaatatgttgatagaatgtgggattggaagtgaaaattgtggcacagggaagtcctggctagggcaaacacctaaaggacccagagttgctgacgttggggacctctgctcaggctagctccttaccaagtctttaagagaggaggcaagaaccagcattagccctagtttgtgcatgttcttcctgactcggggcctctgaggtaagagtggggccctagaggcccctggctgtgcttaggaggaagtagatgagcaaacaggtttacttcctgatacaaaagaggaagtgggccagaagttttaaaacgaaggacccctatgatgatcaatcttccgtggcactgggctgagccttgagatgttgatggtacgctgggtgtatctgtgaggtggacactggaatcagaggactgagtacaggtgattgttttctttagtgttggtgggcctcatccattcagtggacagcctgtatagaggaaatggttgactgagaaagggttctctctgtgccaatcttttcttgacttttgtgagctgttgcatcgtattgctcattatcactgagtttgggatggcctgttacatagccatgggagactggcacaaagagtgagccagtcccacttctctggatgggtcacaaggactctgatgtcaatttgagaccatctagtcctaccatttattttccaaggaaggatgtgagacacagagatatcaagacaaatgaggttcaaaccagagcctaggtgcttttagccattctctgacatattacatgcatctagaaaaccctggtggggtagaggagaggaaaggatcttgatctgggtgcttcccttcccaggtacacacccacatccaaggctatacagacattgggtcttaaatttatcagagtgatttccacccccccctctctttagatgtgtttattttatacatatgagtacactgcagctctcttcagacacaccagaagagggcatcagatcccattacagattgttgtgagccaccatgcggttgttgggaattgaactcaggacctctgaaagagcagtcagtgctcataactgctgaaccatctctctaggcaccatcagagtgatttctaagagggctgagttttctccagttgatatctatctaagatggtttctggacatggattctggtttttcataatgccatcgacacagaggtcctgtctgaatcaatgagagtggatgtgagaaagaaccagtggagagtcagggctcaccattgtgggagccttggcccatacctggctatatagaccttgttggtactatggaggcttgagacacaagtgccaatgttttaaccagaaggcagacaggaccagataatgtctggggaagatcctggtgtatttgaaggaagaatcagaatgtagggaccaagggaggaaaatgatagttggcaggagaatgagctaaagctccaaggaaggatggacatgggtctgagggagcctgtgacatggaacctatccagactcaggtttctaacagtttaaaattccccaaagacacgagacctggatggcagctaactggccctggataatccagtgtcaagacttatgggtgggattcctgaaggcatccaggcaggtgcacttgatagcatcatagaactggggttgtgggagttggatccacagcaaggagaggcaggggagaggtacgcatcacagtcagctcccggcacctgcctgtgggtgccgttccattatcctcccaagcatcctttggactgcattaagcctgcaaccaggaaaaagaaatttatttagagagtacagatatttcacatttagggcaagtgatgatacttgcaatttacatcttgttcctgttgttgggtgtgggttgtagttcttatggcagaggctagtaagtgaaatgctcctggctgtaaacttgatcttattggcaaactgtctattatgcagctaaaaacatctagttaataggcactgtccttcaacaaccagtagcaaccagagtcctgggtggtgataacagtgacattacatctcttttatcacccttgggttctttatgctgccaattatctggcacgtgctctcccctggcttcccagaccatgctctcagcctcatttggctttcctggggctctgtttgtacttgtagcatcctcaagttccactggtggggagaggatctgatttttaggaagcaagagtaatcactggaggcaaaggctggcagacaatcaagcaggtgactccaatagagccatttgccaagcacctagagggtgtgtctgcggcaccagattctgagctctgggctgggaatgcagtaacaggagagactaaaagagcctgagatctcaacaatctgttttttgttgttgtttgtttttgaatcagtaaactgccctcccctccaccccatagaacagacagctttcatgcaagtatgaatgtttggtgaagacgagctctggcctttcttccctgaatgttcaattccaagtcaagtctgctgctttagggaacctcttactatcttaaatcctgtagaaggcttggatcgagtgtaggaaattttcacaagaacccaaatttcacgtcgatttgtgatggattagcataccgaaattggtttaaagtgcgcttaatggatgcattcctgcgggagggatccgcccaaccagaggatttctaaatttataaaattgaaatgcacttcgggttactgagaagtctaaatttgtcaaagtcacagggtgggaggcaggtcgttgcagcaatctgaagccagggctgccaaatccaagagcccaggccatgatatctagggtccctgggccacgcccttttcaggcagaggcaggatctgggccttgtgtttactaagccttggcatgagtgaggtacgtcattggcatcagtatacgtttatggtacagggaatgactttaagtctgcttctgcatgcatgatttctgagcctcagtcttccagccggaagagtgggcatgagcagtgttgatggttggaaaggattagggatgcagaatgagaaagtactgcttgtctcatgaggcctttgaagatctgttaggaccttccttatctcaacgactccctcttcatcctattgtgtggcacacagtaggtgctcaggggatgtttacagatgaaatggatgtgattgtaagggctgtggtgggggtccttgttacaatgctctgaggtccctgtgctgccccttagaaagtctctattcaagttataactgtcactcatttaattcattatcaattatgtggcaactatatgcaaaactttcaataatgatatttattaataatacctaatatgttgattcctgttgcctgataattgcatttatcattttttctatttttagatttatttttattttttatatgtatggatattttgcctttgtgtatgtccatacatggtgtgaatgttgtgccagaagaggacacggggatgccttggaattgttgttacagatagctgtgagccattatctgggtgctgagaaccaaatccaggtcctctgtaagaacagccagcactcttaactgctgagttatctctcccatctccatgctcagcgtgtttccaatgtttgccactgctgtgatgcagcagtcagctcctgccaaaataatgctgtgcaacaaaacagcttacatcaaattagcatttccccctaccgtgtgtgtgtgtgtgtgtgtgtgtgtgtgtgtgtgtgtgtgtgtgtgtggtgtgtggtgtgtggtgtgtgtgagtcatctggagctggggtgacttggctccagggtgcaagctgaactcaggtctgcttcatgggtgttcattctggagccttgctggaagagaaagctcctttttaagatatgctttctagaaggtgggccactaaaatacaacagagcaagccagaagttggaagagcaacctctgactcagttgttcttcaatatcaaaattgtcaaacaaaacaaaacaaccaaattacaaaaaaagaaaaaaagaaaaaaacaaaaacaaaaacaaaaaaccaccaccaccacaacaaaaaaacaacccaaaaaccaagtggaaagtcgagtcgtggagaggtgtagcctgtacaccatggggtggtggctggggagctgtatgtcattgttagcatttggaagtgtgtctgctaagtgtgcatagagtaaaatgtaatccgaattgtgatattaaagagtagaaatttcactcaactataggtgaggcctctgctctgtaatcagaatcaaaaaaggtcataagtgtgggacgtactgtgatcagatacctgtggctttataagagagagaccagaacacacagagacatgtgctccccccacccccaccccctggctgtgtgatggactgagccaccttgggagtctgtcagatagactcttgagcctccaggaacatgaagtaagcaaaccccttttctttatagtgcttcccagcttcaggtattttgttatagtgacacaaaatgtacttgtgtaaccactgtggaagactgaggagctaggagcaataactcaatggcatgagctgctcagcagtgctcagtaggtggtggagatagaatctgaacctaggcaacctgggatgagtgtctggggagggcatgggtgtgcttattgtcttaagctttctgtatttgtttctctctgtttcaggcgttttgtttgtttgtttgtttgtgtgtgtgtagtcttggctgtcctggaactcactttgtagatcaggctccactcacagagatccacttgcctctgcctccaaagtgctggaattaacggtgtggaccctattgcacaccccccccccccgtccacttttgtctcttacgtaggaattgctgaaggcctgagctccagctgtcttcacagacctacccatccattcttctctccctgtcttcattcacacgaggcaactgggtgttgtcagagctttttggaataacaggctaattttttgaagttaatgttgaggggggaaaattaaaaaaaaaaaaaaaaacccttcttcaggtaagctcaggaacatatataataccttggaaagtcctggtggaactcatatcaaagtggcccagggattttacttaaaaacaatttgttcccatgtcagctgtgatttctgacacctgaatttgaaagtcatctgggtgggcccagcgctatccccataatggggcatgtattggaaagtccccatacgtgtggcccagggatcatgttccacacactcttacaggaagggatttcctccttgctgtttccaaagaaccttcactgtgtttgcttaaaccggccgcatgccctggtctgacagctgcctggcccaggactttgcttgtaggcgcctgcacaacccaccctcttaaacagcaacctgcactgtgtcccagtgcaattactcgaatatataaaccttactgaaaggcagtcttttctccggagctaataaataaaccccaaagccacaacgtgtgtaagaccatgaaaaatggcatcattatctattgggaattgtgaactctgcaaaaaccagctcattgtatttttagaaaaaaaaaggtttttgtttaaaaaaaataataaagacctccaaatcactaagccaagtctacatggggggaaaagcaatccagtctaccgactgggagggcagtctcactgcttcattaatctttctttgcagatttttatataagaggcagtatttgttgggaagctagacagtggtttttaagaactcccctgtcatccagggttcctatctgcagtcgtgaccctctgattgtgacctctgactcagtcgccgtggatgctgaaccagaactctaggactttggggggtgaggtgggaacctcaaacaagactgaaaggggctcccgttctctagaatcacctttagcacatatgccagcattttacagttagggagcattttcccggttgcttcaagaaagaagatgctggactctggccataggaacgtgggcagacccaagactgtggcttctatcctattccccagagtctggggtttggtgctccaaaggctgtcccgaacaagtcttaagagtttaaggtgtcatattttatgttaactgatttcatcttcagcccacagccgatcactggagcctttccttgaagcagtcccagtaggccactgcggcagtggtactcggggtcctgtagaaccttacctctcagaagaagcaaacctacagggcccaagagctaggcagcctttgtagaatgcaaaaatacaacagagggcgccgaaaccactcgcgtcagtggccttgaatatcaatgtatgggctgtctctagactgccaagttccttaaaactgtttctggtagccgggtcactgccacacacaccaggtttcggttttgtcttgtcggagtcaccgcaatacacaaactgtatttacttgctgggcgagggggcggggaccaaacccaccgctcagcagggcgcgcacgccttgatcttgcattccagactcgagctgatgtgtgtcagcgcgacatggggcggggggagggttctgttcagaggtttcattcgccatctgcaagtcactcccaaacttttcctcccagcgctcggggagtcaggttgacgcgccctgggtgcggggtgctaggcgcggggctgggcgcgcgctcccgcggagtcggagctgcagaggcttccgagatcgtcttgggcttttcaggtacaagttgggctctgggtgactgggcagggggtggcgagtagcggcgggcggaggtttggctctgggtcccggtgcccctctgcgggttcgcccaggttggcggggaatgggcgctgggagtccggaccgccagggctgtgtgcagcttcactccctgcgcggaggctccggacgcggaggcggcggcggcccaggcagacaatgaacttggagcgcgccgagctccggcaggtttgggcccgcacccctcggtcaggcctcctcgctacaggcacggtcccctgtaggaggcgtccttttcgctgcgcggtcctggccgtgctctaggtgcccagcacgcctggggaccctgcgggaaggactaccggtggcggagccggggctcacacgccccctccctagacagagcgaatgtggtccgagctccaagacagaggaccgggtgctggcgtggtggcgctgtggacagctggaggccggcggaggacgcacgccgcggggcacgcaccggctagctgtcccgcagaaccgccccaaggagtcagaattcgcgcgaccctgggtcggccaggaactgagagggaaggacgactgatataaggccaatgaatagacagatcggcgattttctggagcgagctctccacaggcagagctggggaccgggattcccctagtcgtgttcactgcccctcccccgcacactttaggggaagtttccaggcgtagcctggggcaggtacgtgggcatctgccactgtctctgggtaccaatcggagccgcctcgggaatccgggctctagccgcactgccgctctgggtgggaaggctcgtgtgggtctcggggaacagccccaggcgtcagcgtctgtgggagcaagattcccgaggagacaccgtggggacaggcctgggaggaaccgagggatcagtctcaactttttttactcgccgcttttcccatcgtcgctgtaccctagtccccgaagcggcctgactagggagtctcagctgtgtctcccgccagctggggagcagagagcagaacgaggcagctctgagctaagccgtgggggcggcggtggcgggtggtgatggtggaagccgagaaggcaggggcccggacgcgaggagcgacgctgaggatgttgatagcgtgctagtccgtggggctgtgtgctccaatggagtggaagcgggcgttgtgtctggtagcgggtcttggcgcacttgcccatgtggagcccgggggatcctggatggcggcagggcgaggggagccagactgtgcagggaatgaatggagagcaggggaagcgccttctttctccttctggcgaatcgattggccggcttgcgctcatttgtgttcacgtttaggactccgaggtcccgcgcaccctcgttttgactgccccaccgtggtcgagtgtccacgttgcctgcctgcctgcctgtctggatccgctagagcgagcaacccaatgctagggctggtttgcttactgctaggctactggtggctggacgtgggcacctctagtaagcgcgctttgtccgggttggaacctgggggtgggagtgggggtggggcaccttgtcctaagtcttctaatagatctgctggactctcactgtggcgagtaagttaatggcatggagtttccaggaatgaagttcaggaaagccttgtgacagcctgtggccagcgactctgagctggttactcttttatcaactgctacttcgttcgggccggtggggtgcctctgtaagtgaggactgggtcttcagaacatccactttctgcaattcctgactggacggtgtggatcacttcctgggttagggtgagcatcccaaaagttcatctgagaacatctgtagtcccctctactcaaggtgaggcagaggaaaccgggaggtacagaagctctcccaaagtctcccttggaactcccctgctctccaactgatctttcctgtcagctgtctcattgcaaaatcaagactcccttctgcagaatatgacattgactggttttgcaaagttgatctgttgactgatccacaaacacacacatatggttttgttcaaagtagcttgggaataaaaaatggtttataattgggttggttttgaccaataagtttgcttcccccccgctccccccaaactaaagaaaaactgaggataattttccttttttctttttgtcatctcaagagatggagtttggaggggaagtggcttgctattgttgtttctctactagggcagaggtgaacaggaagtgaagctctgggtccaggcttcctcccaaggtcttgctcccaggtagctatctcagggtctcctgagggaaacagcaccgaggagactggttatcatttgctttttgatgcatgcagaacctggatcactgtcctagccaaagatccagtgttgttacctgccattcttccatcttcatcctttcctccctgtgtctgaagaggggcctggctttccacatttccgagagattaatccttgcatcaggaggaagctacacttgatggaaaggttgggaccagagccaaagggactctgcttattcagaccttgagaaggagctggggagtaatctcagattaacaagttgggccctgggagctggggagctttgaacctggagatagcaagttggagatgtgtgtgtgtgtgtgtgtgtgtgtgtgtgtgtgtgtgtgtgtgtgtgctgggaagaggagggaaacacctttagcaggtgagcaacacaaaggaaaacctctgttcaactctagccagttgttcacggctcttgtaatctcaacacagttcttaaccctagatatggaagcgtgggctggaatctcaggatgatggaggtggggtggtggtggtggtggtggtggtggtgaatgctcttccccagttcaaagctccacgtctggccccttgctgctacttaaagaagacccacactggtacagataaggactaatgtgctacttgtgctacttctcatgcctgggcctattgggcttgcctaggtccccccacatgctgtgtgtcatgtgtccatagctaacccatgcaccaccttaatggacagtgagacttgacataaaactttttgtataccaaatagattccacccttgagcctaaggatggataccttggggataggacagacaaagcgcttgccctcttttaagagggacagacagacatacctgtgtcggacagacaaatgatccttaagttgcaggcctgggagcaagagtgaggcaaagcacgtgcaagaggggggttggctgagggggtggagaggagcctgggctgcagctctttatggccactatgctggcttgggtctcttacaaagtcccagataaagacagcccttggagttggcagctgtcactttgcgcctgttcctcctcctggagcttcagctggcccctatttgtagagacattgtttgaagaccatttgtgtgagagaggagatgtttttcaagagttgtagctggtgtgggggtgtcagtcatctgagcagtcactcaggagatgtgtcctcagtggtgtggggtttagaagcgactgttgactcaatgggaataaacaaccttcgtctctttctgggctgtaagggggctcaggtactgtagatattgagttacttcgaagggcagtttggtcctccagctgggaataaagagatcatgtttgttcttagcttgttgactgtacagacagggtgtttcaacttacacagtcctcaagtattggggtctagcatggtccctgagactgcttctcctctgaaacactaggacctaatgatacacatgaagatctggctctctacatcccgaggtgaacatggaggtggcgggtgcatgcttagcttatccagcctaatatctaggaagaaaagggcttgtgccgatgtgggccaatagggactgtttttctaaaatacgagaactgagcagcaaggctgtttttgataatagctgtcattagctgcgtccctatacattcacagctagccctgcgctaggcaagtcccacagatgtttctatccttttgcctctttcagtggtccggggaagggcaatggaacccccaccatgattttggttatttatatgtgcaaggaaggatgacggaactggagtggggacaggcctggacctagaaggagaaggctgtgcagatcataagtggttgtgtatgtgtgtgtctgtctgtctcagggttgacaagtgggaagcaatttctgtcctttacagaatttgctaggatgccagggaaaggggagcctcctctctgtcatatgcagtagctctgtacagtatttatgcgttccctttaggtgtggccccgggccaggtgcacgggggcagagagtcagctctcagcacgccgtccctgctcagcgatgagattagtgggcgaggcagaacttgtgcaagtcagaattacataatgctgctgacagccgtctttgaggggccttgggaaagtacagtgggagactggtgagtagcttggaggttggagctttggggatgatgtcacccaggtgtcctataaaagagcaaagccccttccaggtgccaggaacaatgcctggcaatgcattcaggaagcactgggtttttgtggtatttttttatttttattttatttttttggttatagaactcatgactgaagatggagagacatctctgaggcctaagattgcatggnnnnnnnnnnnnnnnnnnnnnnnnnnnnnnnnnnnnnnnnnnnnnnnnnnnnnnnnnnnnnnnnnnnnnnnnnnnnnnnnnnnnnnnnnnnnnnnnnnnnnnnnnnnnnnnnnnnnnnnnnnnnnnnnnnnnnnnnnnnnnnnnnnnnnnnnnnnnnnnnnnnnnnnnnnnnnnnnnnnnnnnnnnnnnnnnnnnnnnnnnnnnnnnnnnnnnnnnnnnatggtggagaaccactggcctagagcatcatatcctccctccaatataggctactctgaggccttggccgagaatatagtacagtgatagagggcttgcctagcatatgcaacgaaaaaagagaaaagcattgagagagagacagagagagagacacacagagagaggtcaccttgttccagctatgtttcctgaagctggtctgtaccatcttctcatctgtccagagagggaaagggcctgtgggtgctatttaacactgttatattaagcaaggtagagaccaggtcactctcaagaaaaaaaaaatgctggtttagctggcctttgaatgtcacatcttgagcccttctctgagcttgaaaggggaatgggtgtgggcagggagctcctggatggggcgcgggctcctgacacctcttttacatctcttgaactcatctcagttcaggcattttagctttctgaggaaagtaaggctggcaggtcctcaaaagcagagggtgtcattaaggaaagaaagaaagaaagaaagaaagaaagaaagaaagaaagaaagaaagaaagaaagagagaaagaaagagagaaagaaagagagaaaaagagagagagagaaagaaagaaagaaagaaagagagaaagaaagagagaaaaagagagagagagaaagaaagaaagaaagaaggaaggaaggaaggaaggaagggaagggaagggaagaaagaaagaaagaaagaaagaaagaaagaaagaaagaaagaaagaaaacttgggtactgtacagaattgtgtttgtggtaggaacactgaagcaggcagcctagtcacccaggtgtctggaaaataccccaacatgaacagataattagatacaggctgggcacaattctgttttccttacagtgttctggggccgatggtttcacattttctctggaaatggaatatgtgcctgctgggctgttttgttctttgtggtcaaaaagatagtgtgacggccacctaggaggaagacatgcttttctgtgctcgcttcccttcgggtactgggcccatggctccggcagcacataatccaacctgcattactgagtaggagaggttagagggaggatccttgcagtgtttggctgcacccttgatacgtgggttttaaagcgtgtctgcacattatctgcttatgaatgatctcagtcaatgcaaagaagggtagccggcacttctggtcagcatgtttagggccacagtgcagacattctcctagctcagggcttggacaccctagccactcagagaaaccatgtaagtcccaggcagagcctgtctcggcttcaaggcaattctgattcaagttcctgctgtgttttccctcttattcccgtgaccctggcagcaaggcttaatgtatcatagtctcctcatctaaacacctaagctaacaacctctgcctgtatagtggtttattataaatagtacaagttcgggttcagggatactcccgacatccagctacttttctggtggagatcaaatgtgacttttgttcttatcggaagctgaggttggcaagtctggtgaggcagtatgatggataaggtataccatgagatgctttgactaactcagcaagtctgcacaccattgggtgggtgggagtgggctttccccctcctggacaggtcctttcctccttgctggaggcagcagaagtgtctgctgacgaaaaggcaagcagtgaaggtctatgtctcacttctgtattcccaggactgtatagatactacctggcgtagacactggaggggtgatacgtgttgctttcttcctctgtctggaagcaaagtgttgggcacagtgtctggcccatgataaagggttggtccctgtcctctcttggggatgcagtggacaggatggcccaagtgtgcatgtgatacatcgattctgtgttggtacttgctatgggagactacctggtttgtcattccagggagtgactctatttagattccaggctgcgttcaaagaggaatgcagttcacttgaatggaggtaatggctgactgctagccagggtccttttctttttctttttcttttttttttggggggggggtgtctctcaactggcagtggagttctcccccacctccttcctccgttttgtcttgctatgtagctgaggttgatctcaaactgctgcacttacgtgttatgctgggacacttggcatacggtgtgcctgctattggcttacgctcttaccaggtagagttctgtctttgtgctaagttccctgaccagccagcctagacttagctatactcaggtctcctaggcactgagaagggaagtcttgcatctgctcattcttccttgtgtcctgaccctcacttaggatcactcccactaggaagtctgggcaggcgctgctgccatctcgcatgttcccccttaaccccgccacatacagcatctttcctctgagcttctgtagttccactcttgtatttctcagatttgaaccctttctgtgtgtgctatgttctggttttctaggtaacgtctgcttacctggcctattgagccccttgatagagagaagagggcctgggcccttgtcaatttcttgtcattggaccctactccttgttgagactgatcactatgtattaagttcatgcatcaatttacaaagactcacctgagagctggtctcctggggatgcttgtgtatacttggaagatagggattttggacttggtacaatgacccaggagttgacattcgttgaccttctagaagagcctggtgtaatgaccctggactcctggtatcacatttgaggtgttaatgtaaaagcaattacagctttttaaaatgtgacttgagaatcgtggggagaatgttatgggaatttggttgctgctccaagaatataaacaggagtcatgtgctcgggcaagagccaggggccgttagcattttgtgtgcctggaacatatagcttgtcttagggttccagtctcctttgtttggaatgtaaatatttgcattaaaaatataaagtatgtcctagtgtgtatttttagtgactgtagtttctaaaccccaaatcagactattggtctacagaggattgttttcctccaatttgtgaacctgtttatataaagagtcttccaaatgtacacataccagaccatgtttactttgtgtgcatgacggatctccgggcctccaagaaattagtggccctgatgaatcagggctgctggtgccccttctctacttttttcagttgcagagctatcagtagcagactttgagcccaggtcccatgggatcatctaactctgttttctggtttagtttcctattcatagtctggtagccctggttgatctctgtgtcttctaaccatgcactttgtttcagaactgtttattgttctaggacagaggttctcaactttcctgatgctgcaactctgtaatacagttcctcatggtgtggtgacccctaaccaaaaagttatttttgttgcttcataactgtaactttggtactgttgcaagttgtaatgtaaatatgtgataagcaggatatctgatgtgtgactctggtgggggttgtgacccacaggttgagaaccactgctctacaacagcatccaggagaatgacgttgctaccctgtggctccattgcctggctgctgttgaactgtgcagatctgtgtgacaattttctccatcatcatatttgagacagtgtggtttttcactcgtcctctggaaactaagcccagatctgtcaagtgtttgcttgctgctctggcctgccttgttttctgagttcaaatctagtggctgatgggaactgggctagacctcctgccctgcgtggggggacagtcagttctgggacttcctctgaatcagccttggattgaaagcataacggggtgaaaagtgtcttcccttcacatctagattcttggctgggttacaaattaaactgacacaagacagatggacagaagggggaacatagttgattatacacacatactcacacactagaacgtgggaagaagggggaggatggttgaaggtcatcctgagctagagaaaggagcaagacttgagtctcctgggggaatgcccacacattacaagagcgtagggttaagtcttggttacatggtcaacaaacactgtcttgtgcagctactcaggataactaatgctatcttaggaacaaccaccaaaagacggggtgagtctgcctgagtaggtgcctttcctcactgatgagtgtctggggatgggggtgatgatacacagcttgaattccagtacttggttggcagaggtgagctgatctttgagttggaggctagcctgatctacagaatgagtaccaggacagctaacactacacacagagagaaatcctgtcttgaaaaccccaaaaaaaaaaaaaaaaaaaaaagaaagaaagaaagaaagaaagaaagaaaaaaaagaaaaagaaaaagagaagaaagcacttaagaaataaagccagccaggtgtgttaacacactgctataatccctgcatagaggaggcagaggcaggtggatctctgtgagttcaaggtcaccctggtctgcaaatcaagttccaggacagttagggttnnnnnnnnnnnnnnnnnnnnnnnnnnnnnnnnnnnnnnnnnnnnnnnnnnnnnnnnnnnnnnnnnnnnnnnnnnnnnnnnnnnnnnnnnnnnnnnnnnnnnnnnnnnnnnnnnnnnnnnnnnnnnnnnnnnnnnnnnnaatttgactttgtccaaattgttctggcttgaacatgcaatgttcaagattcaagagctgcggggtcatggagactcgcaccaatgtcaagagctgaggggtcaaggaaactcgcaccaatgtcaagagctgagggggtcatggagactcacaccaatgttccagagaacaattatgaaggacaagcaatgtagagggacaccacattctgagtgtggaattgtgaggatgaagccaaatttgcaacagagacctggggatgttctacatgccaggaaaagggaccatctgttaagagctacaggcagggctggagagaaagttcagtggttaagggcactggccgctcccgtaccaaggacccaggttcaattgccagcacccacatagctgcaaatgtacaaatgtaactccagctcccggtgatcgatggtaccagccatgtactaggtacacatatagacaaaatacccatatacataaaataaaagaaagaaagaaaagctacaggtactgagtgaaaccagaaaccaaagagactacatgtgttacaggtgacaagactttatgggtgggcttacctgagggggatagatatgaagctacaggatttggctttgccctgctgggttttggtcttgccttgagcccttctaccctaatgggaatgtttattccacaccattgtatattcaagacatgttacctggcttttgctattacagggactcatggttaagagattgtatgagttgtagaagaaactttgaatttagtgttagaactctaagactatggggacttttgaagtttgaatgaattttacattatgagatggcttatatagaacggggtagggcaggatgctacgctttgagtgtgaaatgtctcttacagactcctttgcttgagtacttggtcccctggtggtggcactgcttggagatggggtttgagtggcagctgtggcaccctagggacaggtctagaataccatagcctggctgtctttctggtcctagttcttgtctcacggttggctgccagctgtaagctcctgacactgggtggagttgcctgtttatatctttctctaccacaatggacctagagcccaaatacatcatctcttgggttccttttgtcaggcaatccagcatttgtgacgctcatgttgatgatccagtgatgaggaaatctgatgaatcaggtgacatttccttacttctttaagactgagtttcatcctcttaggaggaagaggagggagaggaggaggagaaggaggaggaagagtaggaggaggtgggtggatttcttgaagccaggagttcaagatcagactagtcagtgtggtgaggccccatctcaaatagcagcaacacacaaccacaaacaaataatagctctttggcttggaagaggaaggaagcaggctgctgcagctgctggaaaccaggagctggcccttcatggagcagcctcctcagtgcagggtgaagggcaaatgaagggcaatgggaggaccccagaatggcactttcagggctattgcccccctatgattcccacttctggctccttttgaatggagtgccttatcttggatgagactgccttctccatccactgaacactgacagctttgggcgaggactccctgaggcaggatgatccatctttccttgctcgtctctgtctctcaaagggcatggacttctaggaatgcctcctggtctgcttgggagcttttccttcataactgtcctgggatactgagccctacgtggaaaaggaagtgaatgggaaggtggcccaacatcagaggagcagagttctatgttacccattaccaaacatgcgacttctagttacctaacctcctcacccatgtgataggacttgggagtgaggaccctgggaagggacagcttgtggattctaggtgttgaactaaggaaacacgctactcctatctgtgtttatatttgattcacagtggtgtgggcctcactgtttgtcattgttttaaatgcaaataacccgttccaggcaggcttcagtccagcaatgggagggcattacactgaacatgaggaggtagctgcttctaggatgtgctgagcttgcctaagaaagttatcagaaagacgggatgaggactggaagggtgctcattctgagaactgtaccagcctggcatttacactgtgctaactctgaggagccatgtgacacctccttgacagcagttttagtgaggtgactgggggcggggcacatgaagccagagaaggaagctagtgctccgaaccccttcttcagagttatctgtcaggccaaagcagggagaaacaactgctccctagccaacaatggggggatccacgaatctttcgccttgtgtatgatttagctcagaataaaaatgatgtattaaagagcaggtgaagcacccttgctgtctgagtgggagaagataaatttgctttcagctgctgcaaacaaatcaatgggaaaaccacagggctgctcactctccagtcttcagatttacaagaggaacctctgtctattcacagggcttccccttcagatggcctaggacgtggctggctcccttactcgtacatgcagaacatcgctctcatctggctgatttttgaaagtcatacaacaggccttaaaaaacaaaaacaacaacaaaaaataaaccaacctcattcaacattttcttttaagagcagcctttttgagatactacatgctgtgttagttacttttttcattgtcctgacaaaaatatcagacaaaagtaacaagaatgaggtttattttgacttacacttggagggtacagtttaccgtggtggcgaaggcatggtaacaggaacacgaggcagctggtcatgttgcaaccacagtcaggaagcagacagagggaaacgctggtgctcagtttgcttcgcctttttatttagtcagggaccccagcacgtggtggggatggcttccacccaccttcagggtgggtcttatcttccctctctagttagcgctttcaggaaacaccctcacagatgtgccacaggtgtcttccatggtgattttaaatctagcccagttgacaagtcacacatgctgtgctatatggttcacccaagtatatagtgtgatgttttgtgtatccataggtatgtgcatcatatcgccgcagccgatgttaatggcccttcacccactgagcaagaaagcctgcaccatctttccgctactaccactgttccccctcccaccaccaccacatgtagccctgaaagttacaaatcaacttttggtctctgtcaacctggttcctcaactctgaattgtgaagaacgtggtgctctgtggatgttctgtggtgttctttcactttgtattgttcacgttagcatatgaagtccatttttctaacggccagaggggactgaccacagctctgttgattctattgtcccctggtgctcatttccattgtctccaggtttttggctctcatgagtatcgttattgtaaacattcgtgtctatgtgtttccatttctagggttacatttatttgttttgttttaaggatatttttactttcttccaacaacaaggtttatttattttcctttccctggcccagtcttgctttctttacacatggggtcttggccttgcttgttgtgatgcgtgaaaatatactgaagagtctggattgttgagtcaaaaggacctctgctgaacatagttcagatcctccatatagactcagagctcacacagagtcagggatgaatctaggtttctgagttacaattcagttattctctatgttcttccaaattctttgtaaaaccccaggctgcctttttgaccagcctggggaagaaggtgagggtgggtggacagatggtgactgccctgccccagcccacttctcacccaacaaaggcctgggagtctcatcttctccagattccaatgagagctgcaaaccctggcgccagtggctttctagttctttttccctgcagcagcgagagtccgctgctgatctggaggagtaattaaattaggaaccaattcagagaatgaaattttatctgatctgaccacatccataaacaaggggctgtgattgggactccaggagacattaagaagttgtgttttaaggacttgtgctgggctaaagcatgtgaataattccactggggccaagctggaggcctccctggccaaggttggcagtggacaagagtgtgcagtcctgggggtctggctgtgtccccaggccagccttgcacatgctttgtttccatgcctctctcgagcttcagtgtggtggagctgtgtgttttgtggcagagatggtctctctatttaggagagttctgcctgatctttacgaaacgactctggaggatgctggggaactccgaactggccctttgccacccagaccagcaaacaagatagccacgtggcccaagctgacctcaggaaaccagaaagccagatgcctgctctgcccacttatacacagagatgtacagagagtagagaggcaaccccagaggtaccactcagttttgtagaactttccagtgccctgagtggtggaagacagtgtgtagaaagagaggcctgaatttaaagacgtggccatgctgacaagagtccactatgtggggaaataagggattatggaccaagccagggagacaagcaggaccccgatgcccaacaaagaagcacctggcttcttcctcttctacactaggttcaaacacacaaagcttgacttcgttgttggagatgttggagacgagacaggctggatgtgaaatgacccaagggagaatgggaagctgtcatcagtccctgaggtgggaagctgaagggtgctgctttctgtctaaagggaagcttgccagcattgggcctgtgagatgagcgctgttgacactgtgctggactaggaggcagagagagcagcctaacatagggggccaagccccaggggtccagtgacagttaccctagaaaaaggtgcatgagggaggtggagatgagagagaaacatgagttgaaacattgtttatcccccctctcccaaatgagccaacatagctctctcatggtgtctttgctagcactctcactaatggcctcttaactgtacaaagaggtaaagttgggaggaaagttagggaccctaaatcaggggtgctgcactagaaaccccgcagggctttgaaagacatggacattctttggtttcctattagtttgattgattagattgttgaaggcatctatgtgtatataggtgcacacgtgcatacgtgtatatccatagagctgtctgggtccagctctttaggtagaaagcgctctctggcacttggcagtgattacaaccattctctgaggggcatttgtagtccgttcacattgaagatgagggataggtaaatcagaacaatgattatgggaatgagtctcatctgtcctccgtgtctgttgcgacttcctctgtgactgtcttcatgtctcatgtccagatttgctagagacaactcactttcccttgctctgcagtgtatgtgtgtgtgtgtgtgtgtgtgtgtgtgtgtgtgtgtgtgtgtgctttagatctgttttccttctctttgtgagtggtcccaccctctatttccacagcagccaagccagagacttgggcatcatctgtgacagtgagctgatgaaacatacttgcctttgttttatctctaccacttcctatttcattttccatttgaaataggaaatgaatcttattcaggattggaaggtgtgtattggacagttgagtggatgtgtggccaggctgatggatggaaagaagacagtcgagaatgggcagaagtgtcttgggccacagtgcatggatggcttcagtcttttccatctgtttggttccccaccctgtcactgcctttgtagctacagagacccgctgagatgaatggcttgacttgctctttagcccccttcttaagaaaacgtagtctgaccccaaattgtcacgtgcagtttcatctataggtcatgaacacccacctgagccttgctggccagcagctgctttgaggttcggaaaaccagggagagaagagagattgaaaaaaaaatactgggagccttgtctcctttgtagcggttggcttgtgaacaggaaagagaagggagccatggtagacagctagaacaatagtcttaaaaacggtactgaaacaaccacagagtccagacatgagcatgggctgttaacctgagttcagtggtaattcaggcagcctgggtctagggatgggaactaggcaccttaaacatccacactgattacctcagtgaccaacgctatcttgccttgccctcttccatagaacttgatttgttcttgctctttcccactgctgcttctagagagttctctggagagtcctgccgtgggtttcccctttgctgctgctgccttgctgcctgctagtggaccccaacactgcctgcctatcccatgccctgccgtcgcccacagggaacggtgtctccaggagatgtttctgtggttccctagccctctgtcaggacattctgcaccttgtctacaggtggactgctacagataacatgtagtagtattctgcgctggtgacatgtgagcgccagcctttctgccctgcctgcaaacacgctggcagatcctcaccagatgatccctagtccctttttgtgtgttaggtctcccccagtcctcctcagatgtccttacatgactgtcacgctagaaagtttgccagtaaatgttaattatgcaacaatacacagatctgcttcccactgcttaagattaattctttaagttgtggctaaaatataaacttctttgtagtttagtaaatgaagagaagagaaaataggtttctttttctttttctttttcttttttccagagtagcttgatttagaatcattccagatgttcacccagcatctctctttcccgagcccaactgtctggaagctgtcttgggctgaaaacctgccaaggacccccttaatctctccccacttctaacactgcctcataattttaactattttgaaatgattttagacatgcaggaagttgcagcgttcctatgtaccctttgcccagcttcctacaatgataacatcatctgtgaccctaggaccccataaaagccaggaaattgaggctggcccaatctcattaaccaagctgcaggccacagtctgcgtctcttgatgttattaaacccagggattcacagcactttggaagcgtttagaatttcactaagttcagttccgtcttttatcatttagatgatttttggatcctttccaattggcagtcaatgatattagtttctgccaggtcaataaatccttgaagggccactttaatgcatttcatgaatgctcgatcctgcttgatactctatgggttcctctacctgaagagtggacccagataaccctcttatctgggtttgaggaattcctggagacaaggaatgattcaggtcagtgtggtgtaatggaacatatgactgaaaactgaggtcttgagatctgatcacagtaaccagaatacatggggttacctaacattccgagtgcccccatttcatagttcaaattctagcaacttagtagtagagttgggacttgaacctagatgatctgaatcagagagtgcttgcagcctgttagcctttcaagcgggtctacacacttttctggcctggttctcactgactgtgccctggttgccccccacccccacccccacccccagctctgagatgggctttactaagatctaccacatctcttaatgtaagtgcagtggctttcctggtgaaatggttttactggcagagctgggagccctcaaaaagaaacaagcaacccacccaaccccttggaggtgctttaaggtgagatttttgtagttgtatttaatgtgataggagccttagttcccattgaattatcttttgatgtgttttaattaggccatctgcaaactgatttcaagatgcaaaatcccgagtggccggccagcccagcacccccatgtacttagctcaggactcacatgatgtgtgtgcatccctttctccctgtcatgggtgccattaatggtgacatgccactagtatagaatatgggaactttgtctgcataattgggtttgcagtctctaccaaggaagcctgcttataaatggtgtttaagctgcacaggcttgggggacaagctgtaaaaaccaacagtgcagagcactgggtgaagggcttaattttctcttctgcttggggaccaaacacattactccacgaaggtaaagattttcccatttatagaggctgtgagggataagcctcggctcataaatttcctccatggcctctcctcagagcctgtgagatggcctgactccggggaccagtgtctaactacattagtgcgataaattaaagggcccagtgttggctaaattgtcaggcagagctgcatgggagctggccctgagattggacttgtgataaacaggcttctgctagctcctcctaggagagggaccactctcgtccccattcccaagcactcctaggaaagctccagtgataacccaaatctgagacagaaggtaatgttcagagtgagtcgtcatcagctggaatgcataggaaggaattcctgggtatgttttctccattcgatctcattgtcattgtcattctatctgtcttgtctgttgtctgtctgtctatctatctatctatctatctatctatctatctatctatctatctatctatcatctatctatcatctgtctgtctatctatctatctatctatctatctatctatctatctatctatcatctatctatctatctatctatctatcatctatctatcatctgtctgtctatctatctatctatctatctatctatctatctatctatctattgtctaatttgttctaggctattcttaggttaaatatgtagccacggatgaccgtgactttctgatcctcccatctttggattgcagatgtgtgccaccacacttggtttatgcaatgctgcggattgaacccaaggcgttgtctatgccaggcaaacattcttaccaatggtcttagtaacctttttattgtgataaagcatgtgaccaaagccacatagagaagaaagtgtttaatatggtgcttatggtttcggacggtagagttcataatggtggagaaatggacacacagggaatattgctagtcttttggaaccacaaagcctgaccctaacgacacacctccttcaaggccatagctcctaatccttctcaaaaagttccaccaactggggatcaagtattcaaacatgagtgtatgggagccatcatcattccaaactgagcgatattcccggttttcattattaaactttttatgaatctatagactggcaatgtgattttcaggctttggtgcaacatggtcctaagagtcccatattaaagaagccagaacttctttatagcagagcattaaatgaagtacacagagggtttgaacatgagttgactttacaaatgttcatgtagctggctctggaagcttgcatgatactgaatctggagggatctgatgtagggcaccttgggagagtcagagtgtgaatgcccagatggcagaggtgtgctgaattctgtgtacaaatctccgaggggtttggccaggtgccattctggggacatagtgtgcctgtctggagacactcttaggaatgcttaaggaactgaagcaacacatcatgattttcctaatcagagctggggtttcattggctctcagattccatgggtcaagtctctggagtaattgcccctggagtaatccagaattaactgggacaaggatctaggcgtctaatgaagcctaatgtcttcacagctctgccttgaagacaaatctcttcctgtcctcttgcctctcggcctcagtcccaagatgggaagtccatctcctcactcctcttggcttttcacctctgatattttctgcttgggctttgtcctttgtagctgagtggaatgtccttggagagagcccaggatttcaaaggcctccataggtcattctagtcactgtgaagaatgtcaacctacaaagacaaggggtttccaggggaggagagggcatttctgggaggatatatctctcccctggagcaagtggctgcagaacttggcaggaactttgcctggactggtcgagacatggtaggtgatagaagtgagaacagtgtcaagggatgtctgccagagagggacactaccctccaggacagttcagacttaaaatggtttttggtcggaaatggtaatcttgaagaaggattaaagttacctaaacattagggaaagttacctaaacaggagagctgccccattccacactgctttggagatggatcactgggtagtggtgtataatggccttggtggtcaccaactttgtcctcagtttgtacagaggccactggacttgtgaatccccagccagccaggactctgttctcatgctgtgttgtcacaagttgataaacctgaatgggactgtgattcttgaaagaaagtaactgtcttttatgcctcccggctacagctacggggagaaagtgtggcaggtagccaggtgtcctggggtacagtgagtggaagtcagctatacctgcttgcctggaattagatcctcatggacagtggagtactaaaccagtgtttaacacagtgagcgaataacaagtacagagcttatacattcagctgaaagctggttttatttgttttccttggtaagagagccacaatcactgtttttttactttaaaagggagaataataggattaaacatctctatgatactcttattagctgacgtgagagcctgatacacttggctaggtctggcttaaagatattaggggggggnnnnnnnnnnnnnnnnnnnnnnnnnnnnnnnnnnnnnnnnnnnnnnnnnnnnnnnnnnnnnnnnnnnnnnnnnnnnnnnnnnnnnnnnnnnnnnnnnnnnnnnnnnnnnnnnnnnnnnnnnnnnnnnnnnnnnnnnnnnnnnnnnnnnnnnnnnnnnnnnnnnnnnnnnnnnnnnnnnnnnnnnnnnnnnnnnnnnnnnnnnnnnnnnnnnnnnnnnnnnnnnnnnnnnnnnnnnnnnnnnnnnnnnnnnnnnnnnnnnnnnnnnnnnnnnnnnnnnnnnnnnnnnnnnnnnnnnnnnnnnnnnnnnnnnnnnnnnnnnnnnnnnnnnnnnnnnnnnnnnnnnnnnnnnnnnnnnnnnnnnnnnnnnnnnnnnnnnnnnnnnnnnnnnnnnnnnnnnnnnnnnnnnnnnnnnnnnnnnnnnnnnnnnnnnnnnnnnnnnnnnnnnnnnnnnnnnnnnnnnnnnnnnnnnnnnnnnnnnnnnnnnnnnnnnnnnnnnnnnnnnnnnnnnnnnnnnnnnnnnnnnnnnnnnnnnnnnnnnnnnnnnnnnnnnnnnnnnnnnnnnnnnnnnnnnnnnnnnnnnnnnnnnnnnnnnnnnnnnnnnnnnnnnnnnnnnnnnnnnnnnnnnnnnnnnnnnnnnnnnnnnnnnnnnnnnnnnnnnnnnnnnnnnnnnnnnnnnnnnnnnnnnnnnnnnnnnnnnnnnnnnnnnnnnnnnnnnnnnnnnnnnnnnnnnnnnnnnnnnnnnnnnnnnnnnnnnnnnnnnnnnnnnnnnnnnnnnnnnnnnnnnnnnnnnnnnnnnnnnnnnnnnnnnnnnnnnnnnnnnnnnnnnnnnnnnnnnnnnnnnnnnnnnnnnnnnnnnnnnnnnnnnnnnnnnnnnnnnnnnnnnnnnnnnnnnnnnnnnnnnnnnnnnnnnnnnnnnnnnnnnnnnnnnncccctccccccctctcttctttcttctttctttcatgtgtatgggtgttttgcttgcgtgtatgtctgtgtgagggtgttggatcccctggaactggagttacagacagttgtgagctaccatgtgggtgctgggaattggacactggtcttctggaagagcagccaatgctcttaacagctgagacatgtctctaggtagagcccctctattttccttatcttacactcttccttgaccaccccagagttcctcccccttcagtccagtggctcacatgttcagtgtctctgatgatgctaggcttctatggccagcacttagggtcccagcgatttgctttcactctctttgagggtttgagatatttcctgtaaacgtcttgtaaagtagaaactttagggcagcccagggactagaaggcttccttgcatggggatgctggctctgtgaagtgacctgaggattctgggatgaaacagcaagtccttctggggtggggtgtaacaggagcatctagggttattataaaccactcacgcttccaccctagaaagccttgtaaggaaagatgccaaaaggagtgggtatttgacattccttgaaatgcccactgaagttttcttccctgtctttaggccccaatgtgccagtggccactgggcggatggagcaaggcttgtagcctcctgcctgactcctctagagaggagccattcaagtccttggcacctggaggccattagccccctgactccgtgctggatcataaaataagccctaagtgcttatgaatgctgctaaccctttaaaaatgtatggacagcggaagttcagtttggcacctctgaaaggaaatggcattggtctgatggaaaaacactcaccttcatggtggaggtgcaaggggtaggtggttagaacggcccatgggttcttcacccctttacaggtagaaacttaactctacccattaaacatgatgaattatttttaccattttgtttttgagacaagactttgtgtagcccgggttggccttgaactcctgatcttgccttttcctcctgagttctgagattataagcgtgagcttatggactgcttttaaattggaatacaacgtacatgaacaacatctgccacaagcatagagcttgaaggatgttcccaaacagctccctcagggacagccagcagggctatgcacagcaacctagaagtccctggccctgctctatgcatcactaaccacctccccaccctgcttatgggaaacctgtcctcccttccatagccttgatctttttgtttggatcttggactccatgacagtggaatcatggggtgtatttgcctttatatttggactcttttgtttgataccatatttataaaattcttccctaattttgcatgttcatttttgtagccaggttgcgttcatccactccactgtgagatgtacaatttggagcatcacacacagaactcgggccgctctagattgagtattttggcagatctgggaggtgtctctgggcatgtgtgcaggggtagatggccaggctggggatgggcttacctcaggattctgccagcccttcaagtgatcaagataggcccacctgcagtgggggacttccataaaatgaaataggagagagggagagggagagagggagactgtgttctgcctgagttccccaaaaaacaagatcctaagggatgactactggattgatggactagggagtgagcccttaaggtgagtgagcttaaagatctccctgtcccaatagggctctgtaatcccaactcacatgtcgtgggaagtagtctgttctaaatttgagctatggggattggtcagtccccatggaagttctaggaccaacattttagtcttgatgttctggggtacatgtgtgtacactggctaaacttgtgatggaagtcattgatttagaagccagcctggaggtctccctcctgaaaggagagcctgggcctgtcatatacaacagtggctcaatcatacagggtcttcaggaagtgcaaggggagagagaggacttgaagctgccacacctaggctgttgcctacctgcatagccccagccatatgggttcatccactgggacaagcattgcacagttttatagcagccctgggaaataaatgacttcccaaacttctggctggcaggtctgcaagaagagagtgagacatgagactctgtgccgtccagtgttcacagccccagcagtcccaaccttcctgtaattctgcactctggccacctgcattatctaccttcatgattcgtcctggtggcatcacgtagccagcagaccctcgtaatgtgaccagtaaaaccaaggaaatgggatttttacttttcctttaacatctcctaatttcacttaatttaaatttaaagcagattcttaactccagtgctaggagatttttttttaaagagtatttggagcagcttgggcacataactcctataaaattatattgtaaaataagtacagatcagttactctcgggtcagatgggaatttagcacccaaaatgggacatgctaaaaatgagaatttttcattaacagcttctatatgaagatatatggaaatggtggcatcttgaaaatgttgggttgaatattgcatgcaaatgaactcttccctgctcgctcaagcttgggccctatcttactggaattccagtggaatgtttaaaggggtgtgggaacctgctatttcccatcttctccatcacctgggagtggctttgggggtgactactcctcaggacccctggttgctccaatgggtctcttgggctctggttggcttgtggcagtcctgtccattgttccttgtcccaagaggggggaactctggcaaagctggggcctgtcctttctgccacttctcttcaagcatcttcccacctcagctgaggagtcccttcccctcaagctgagtgttctacttttgaatttttaatgcaaaaaatgtcattgtatgtggtactgtgtcactcaggccattttgatgtaagtacacactgtgtgttgtgtatattctatccccactactcccttctttcacctctccctgcaggacaggtctcacccacccctccctgcagttcatctcttttgttgccctacataggttcccttttaccttcatgccatataatattttgcttatcagtataaaaatccaggtaccacatgagagaaaacataatatttgtcattctgagattagctttgcgttcatgtcatagttttgttttgtttttgttgttgttttgttttttccttttcttttacaaagtttccccaactgtcctcattactttctcctggagatggtagctatgtcaccattttcaagtgccttagggaagcaggcatagccacttgtccaaagttctacaattaaagggagtaatggctggacatcaaattcaggggaacactcatcgtgagtgacttctcccacgctggtgtattcaatggttgatgcacactaatgtgtaaatcctgatttctcagcccctagaatcatcatcaggttgtgtgatagaagatctgtgtccctcctcaagaagattggggtcagctctggcaaggacaagctggccacctgtgggtgcactggtctcaggctggcctctgtgtgcaggtgctccccaaaggaagtttgtgaaggagggctgttccagcttgtgcagcggggccagcctctctgcttaaagccagtgatgcctggaaccttcagcttgggtcttcaatccacttgagccttctccaggtcacagaccctccacactgctcttcttgatcatatttctcctacactgtcactttttcaagtacagtgaccgtgatgtcatatcacaatacagtccagggccaccctgagaccggtctaaaatccccagggccagtcctaatgtattaccctcctgtattaccctgctttggtgtctctgcttgtagtccactgtaccatactaccagtagggagggagccctgaaagtttctggggtaaacttgaactttacaagactaaggctttgtggttatgaggcgttgctttatatgaggccaaacctgcaggattcagttgagcctgacctatctgttggggaaatgggatactgtatcctgggcatttacaacttggttagtgagtgccaagcacaggctaatggtccccttgagatgggcccaaggtgggattgggggctaatacagagctcagagtctctgcacttcctcatggtaaagatgcttgtgttgggcttgcctagtcctgtcccactgtgcctgtggcagtgagtctaaaggcacatgcctaggcaagtggactctgacactttctggcttggatcattttactgtactttctttgtgtgctcagggccccaaagacagaaccattcttagaaagaaggaaggaaggaaagaaggaaggaaggaaggaaggaaggaaggaaggaaggaaggaagaaaagaccttgcttttatcgtttgaatttatgttttatgaaaatcaaatatgatagagccattcacaagaaaaggtctcattttaaaagtaacatttccctctgatttttatttcctatttgagagcagggacagctgatatagagaagatattaaaatgcatgtggttcatctctcctggtttagtgtgaaggatcagctgttggaactgatgggatagtagccatctccgaaacatttcaaggagcccggtttctagaagagacaagaaagacacataacctgcatggtatagaccagaccagactgtagacacaacccacatgttcctaaacaccaactatagacatggtgatggggcagtgatggaaatgaaggtcagagttggctggcagacgttgtgggtgtccgacagcacagatttttagcaggcttgaaaaccagggcaagactggctttcaaggctgagaagctggcaagttggagaactttgtcaggcaattaacctataacttaagccatcttaacttaacttataactcataacttataattcaaagtttaagccatcaagtactttgggaaagcaagttagaaactgaagttagtgtctttcctccccaaacagagtttgggtttttggtctgcgaaaggctgcctctaagcacagggagtgaagagacaacaagcaattactcagatacttaatgtcaaaactctcagcgcctttgccgcaattagtgaaggaactgaagcagaaagggagcgcatgggagaccccacaggcaattccgggaacatctggcccaacttctcaccttcagaggggttgggggcccgaaggaaagtatgggggtggcagaacactgattccatgtgaacgggctcatgtgctgagccctggggagtggagcgatgccaccatgggtacaggttctcatcatgaagcccgtttcagttcctcatcttaaaatggacaggaatgggctgggagatggcttagtgaataagaccatttgctgtaaaataagaagacctgagttcaaatccatagcacccacctaaaagccaaacgtgcctgccctataacctcagcactaaaacgtgggcccaggagctaactgcccatcaccaggctcctgaacagtgatgaacatgagcaatgattcagtgagaaaccctgtctcaaacaataaagtggcattcaatggaggaacacacacacacacacaaaatcaattagtagtattctttgagatgtgtgtttgtgcggtgctgtgcctgggggtgtcttgttacctgggactgggggccgtgtccacctatactctgagaagttcagcctttgggacctgcaggccaccttctcctgcttcaggtcaaagccatacggatggtagcaaatgggatgcaagagaagactaagtcagtggcagacactggaccctcctgcagacaccaaaaagcctgttgtctcagaaatctgtgatagggttgggctttggttgttgagagagcagggtaggacgcagagagacagtaggcccttggctatagcatggagatgtttggcctaggttggggttcccacttcataaagaaaatgtttccagatcttttataacttgtgaaatgaatgttttgggggccagtaagggaggcagtatttgttcattcatgatcatatttctttttttaaaaatgtcccctcaagtgtttggatgtgaaaaatctcaggaatacagacagccaagccctgcctggaggtcatcagctgattgtattgcatcgagagagtgaaaataatcctagcctaagaacatcaggaaggcgactaggattgctttgtgacaatctcttaaatgggggagttaggatgataagaggtgggagacatcatattctggtggtaaggtagaggcagccagtcatggattcaagtcccagccctgccaggctacaccaaagaactccaaagactggtatctctgcttctcttgtatcttcaactcttcccatgctggaggagactcctggcctcggccctctctagtagtgaatctatggaactctgagtctgccccccacctccccagaagatgtatccaagtaatgtgtcctttctgaagtgtagacaggagagaagcagtgagggagccacacacagcaaggcagagagacaggaggagcaaggtaatttttagttctctctgaatagtgaatgtttttgaaacacttgcagatttcctttatgggaaaggaatgaagcggctgcagggaggaggggccgactgacccctcccccacctcttttgtcctgagctcagtacctggtttttatggcatgtggtgaaaaatggcatgttctgaagacactgggaaatctgcctgatggtggagtaagagcggagaatgggcgaaacgaaagaaaatggagaaagcagaacttctgcacacagatcagaatcatataatttaccaaggcataccattctgttgttttctgaagtgtgaaagctaatttagaaagggtagagaggcccgccggggtgggcaggagtgacaggtcccagggccctcacaggcccccagtctctctgctcctgcagagtgggtgtgggtgctggagtccctcaggcctatggagccagcgccagcctccccgccccccccccccacacacacacatcagtgaccacatccaccagcaagataccaagaaacacgttcccaacaacagacgctagtcccagagaagcagaattttaaaattctattttatatataaaaatcgaaacctctattgggagctttttaggtttgactgtgtggggttttgctgcacgctgcttattttccatgtccatcttagatttccttctgttggggacacttttgttaagtgaacagagcctctcccacctcccaactcagaggttgaggcaggtgctgttggacacccacaaagacgcacagcggaaggggcttgaggagcaagagcagggtctgatgggtgagggactctgggctttggttcaggtctatagcgtgggcagcactgatgggccagaggctgatacacagtgacaggcaagactgcagtgagtggctctgggtaccagcctggagagagaggaagagcaggaggcagctctttccctcagggccacacagtaggtgagttgctgcctgaccttgggtgtgcactgatctgtaagtgtcacaaagcccagaccttcagctctgctcgcccgaatcattctgagtcaggcactcttgtctgctgctgatcctccaccatgcgtttgcaagtgtgggatcgcaccacgtaggcacttgacaggcgtggttactgctgctgtgaactgaccgaaggtcagaactgttgggtcgaactgtttattttctgagagagaccagagcagcccttgataggaagttagtcacaagcttatatttatttatctgtctgtctgcctgtctgtctacctatattttatttttttcagactcttgtttttaagcctaggaggaagtctgatcttctgggaataagccttgacttcacgggggtgtggcaggtcctccctggtctctgtgactttactctgttcagcagttaagtctgaggttacagctttctcgtatcacacatcatttgctttgtgggagtccgggcctgagccaagacgtgctgattagcttttgaactagtgcttttttaaaaaaaaacttgtttacatagagctgagggcacggctgctcttggggccagctggctggcttccgcagtggctttgttacagcctcccatgttctcacctggcctcatatagctgtgtgtcagcttccctccaggggtggtggtgtccttcacacactggtcacagacagccatggtcctagtgtatcatagcagtacctggcagacaccaggactcttgcagaacatacctttgtgcacatgttcactgaaggccttccaccttcaactatggagatttgcggaggaattaatgaaaaaacaaaacaaaacaagacaaccctgtgatctaccagggacttttaaatcgctagactaacagagaaccacggcccaggattccccttctgatatatgcatcatatctgtgtttaggaacttggtttgtctataaataaatgctcggttgacctattttacagagactgggaaatctcgcttctaggtttgagttgaggttccagaaactaggtctattggagtctaaaaggtggattttttctcctagaggctcttactggccataggcaatcctttatgctaatgttctggggttcccatctggtctctgttgcactgtggggtgaaggggtcctccatatgagcttgttcgaatcccctgctagtctgctgccttaaggattctgtcatcatccaggataggttggggcttcagacactggaccaaagttcctgttgttagctgagatctttgcagaaagaggaaaggaatgacaggatggggggtggggtggttatggaagggcttttcaggctctgggggttagtggcatcaaggaaacatttcgcatagatgttaatcccattaatcctccagaatttcctgctgcaattttctctatacggatgggaagcaaacaagcccagaattgtaaagcagctggcctgagacacacagccaggaagaggtggattccgggagatgtggggctgtgattaatgctccttggtttgggattctcattttttttctttcctccacatttctctttgtaccagagtgtacctgtccatctcacagccattgcagtcacatggagccccaatcaagggcatctctgttccacggtcacataggtgaatgctcacaaaacagtgtcttccagagccatagtgtcccatgtgcctcttggtctctgcctttgacttgtacatgtttataaagatctacacccactggggaattctgtggtctgtcttgggttttccgttattgtgacaggaggcaagagacagtgtccttcatgggatggctctcaagtgcatgattttcagtcaacgggggatttggttggtgatggtgatggtcatgacgacgatgatgatgatgtacaaggacaacagctgagcaccatgttgtggctagtggggggatgttattaattcaaagatacttgagtaatagagggttaaagtggagcctaggtaactctccccttgttctttgcattcaatcttttaaatcttggccatctctagcctcagacagtccctctgcctcatctccaagactggcagagcaaggaggttggcattcgaggacaaggagggaggttgtggctgagggtgtgacttaccagacctttgttccagcctgcttctctctgcccctcctttgttacttagtgtttattatttctttactgctattgtagttgcaagaggaatacttgatctttccaagtgaacttcaaagccagatgggactgtgaaagtgtgagccaatgtgccccaagctccacccacagtcactcttggaaactggttgctgagggatgtacttgtcactgtgcttaatggaaagagggccagctggggcttctgctgtgtctagctctgcctcctgctatgctgtgattcagagcaggctgtgtcccgggcttctgcttctcttccttttgtactacagagcagccacactcacctgtagcactgtgagtggtcaggagcagaagaggaccttggtgggtccacaggacctgccagcgcctacccagctttcctccatggtactgaaagtgacttagcaggacttcttattttgccatgtacttgcctacatcttaattttaaaatgatgttaaaactttctaagctttctaaacatggtatcttggatctttcatgcagatccctgcacacacacacacacacacacacacacacacacgcaccaggtgctcaccatcacatccatggccacactgaggcagatgcacaggccactctctggcctctcaccatgtctggtaagggctggtctgcttggggatgggaagtgcatgctatgcccagcttcaccttgtaaaaccatctagaggacactgtcagataggctgcctgctctttccatcagaaaggaatgccactgaagtatctcaggaggttctccccattcaagggttaaatcagactcttattttgcttatctttgaaaataaaacaatatttaaaagtattccgatcagggaggccatctggcggggagcgcacagctgcttccctttccattgtgccgcccttaatttattcactctaggcctctgctgtacattgcgagatcatcattcgcattctgtgaactggcaatgtgtgagttctgttctgtgagggacctgaagggcatctgggtgggctatctcctgctacccaggatcttccctcttctctccagggtctgtctcagtgggcaggaagggtctagggatacaaaggtggacagagccaccctgtccctttggtgctctctctctttctctctctctctctctctctctctctcatttcctcccacacattctctctatcctctctcaaacactctcttctctcactcccactcattttcattctatctctcctacacatcactctctcatgcacacagtctctctcttacacactcttacacactctctccctctctaacacatatacacacactctgttacacacgcacacatacacacacacttacacactctctccctctctaacacatatacacatgctctgttacatacacacacacactcttacactctctccctctctaacacacatacacacactctttcttacacacacacacacacacacacacacacacacttcctctctcttacacacactctctctccctctctcacatatatacatacactttctcttacacaggcactcactccctgggcacatcttctttccttcatttcccgcttgtgttaggggactcgttggacaatggccacaatgccaccgcttaaggactttgcactccagccacatgggagccatgatgtcagaaagcacgtccctttccctggcaggtaaggtttggggctgcacctgcaggaagcctcacaaacacacaagaggaagagtagctggttctcagacacctgatgtcttgatgatcttgggccaatttggagacacaaagcctttcatgttgacctggagaagaagagggtgagggtctcagtttgtctgcagtcacatggctatttcaatgttgtgatcggtgcccagtgcagactctggagtctttagatatccagcccccctcccctggcccatatcctttcctgtctctgtaaatcacaccgagcaggaagtatatgacattgaattcacagttgagctgcttgtacagtggggctaatacttgtctttaatattatcaggacatttaaacccaaccatccacattaaccctaggctggtgtatggacacagtcagtgtccgctggggtcactctggtcaccaagccaaaagtgccttgtcctggagcattcctaggaactcagtggggcatatggaattttcttctgtcactaaggtggggatatttactgaccacccacccagagtgaggtccatgctctcctggcctgagcatctctggccctgggcttgtgtggagctcatggcctagcctggctgccttgcctaagcagtctcaaatccagtttgaccaatcagttaatggctgataccctactctgccagcctctgttggtggcagcttcatttgggtatataggtgaaaggtcacaagctttgcagccaaacagatccatggttgtctagtcacctcctgtatcattccacttaggtgcagcctataggaaccaagcttcctgtgttctgagcctgacaaccaagctagctcgagggagcactggctagccgcgtgactctgagtgtgtgtataacccttctgtgccttagtttcccacatgtactttgaggctctgcatattgactttggagggttactattaaggacagtcgtatgtggcctcccacacatggctgacactgtaccagtaatcatttcttcctttcactgtttctggtgacactgaaaaccctgggtctacatgctcccctgggaattcatgcctcagtcactatgttccccagagctattttggtgggccagctctgaagcacagcttgaagcctgtaggtttcacctgagtgggatggcagatagttactagacagacttgaatggaagagcctgtgtcccggtgatttgaattaccaccagaaataacaaaacgagtgttctaaaagagtttcccctgtagacatactgggctcagaaaaagaaaatcgtctgttgtgtcacgcagacctttggagtcttttgtgcacgtggaaatctctgggtgagaactgcaatgtgaacatgtttgaagccccttgcccactatgcctttgtggagcaaacctgagttatgtcacggctgttggtgagacaggcatctggctgggtttggctgggtcagagctggaacagatggacagctccacccacccacctgtccctgctgttggagactgtggctctaggcatcattactgttgttagggtgtctctagcccctaagccatggtgtgtcttttacagattgcctggcaccaggtgggtgctttaggactgctcctgtcatggggctgaacagttttggaatgacaagatgatcatgtctctggaagtccctggagtctttgctgtggagttagcgagatgctcctgagctctgggctgtgtggtcctcatatttgtgctccccccccccccaatgcaggcttgagtatggtgcaaggggctgataccatgtaatggacagatatggtggtggaagggggaagggtgggcttctagtgggagaaaacccatgatgaatgaaactttaagattgactgtttggcttctctggaggctgagatagcaaagcctgtgccagcttttaacagttgctgaaaactagatgctgagcagccgcaaaagacagaaggaagcaatgatggtaggtttttgttaaagagaaattaatctcagatcctacgtctgaaagtgttaaaaccaaaaggggcagtccccaggccatggcttccatatgatcaagctaaggcccggaaagaggccacggctcctaagggtgaccagccagggtttgagtctggtttgagagatgtgggaagttctgctcagacccttccctgctcagtagatctctgccatgctggtagggtatttaggctgtcaggttttgaaacagcctttcaaggaagtgtctatttggtgctcagcctcgagagcattgctacaacctggctaactaacatcatagacccgagcctgtttacctgcgcctgcaagagtgacgagggacttattgtacagggagtctcctggacctgcctgctctgcaagttcatttctatgtttctgcggtttcaggtgtgtcagtgcacccagactgcctcttcttcctcctcctccaatcagcacctggcacaggcttgttttgctttccatggctccttctctgtgcaggacacatggcaccagaccagccagcatcccctatcagcttcgaatgcaagtggaaattgagatggcatgagactcagtgcctctgcttctaagggatttggagaaaaaggcttgaaagtggcccatgtcatctcctcctctttggttgagtctccctctcctccttatgcagagcccctgggagacagaagctgatctttaggttgagttttaaaggagccaggaaatgaaggaaccacgggcctggatgagctgctggaccacttgaggctaagccagatgatgggctgaagtctgtggaggtgcagatggtgaaggtggggtgccaggctcctgaatctcttaccttatctgtctcttatgagctgcatgtacttgagaagcaaagaaccatgctgcacctcttctctatcgaaggcaggcctggatgagcaggtgcctataggcttgtcctgcctggttgataattctagagagcatgggttcacctgggcttcgactatacccactgtcagcttcaagatatgctagaggtttcccaccatgaattggatctttagaagttcctagggtcccctgtgggtttctctctgtcacaactttcttcctagcttccttcagacacttagggataagcatgccacctgtctctttctggaattcctgtcctcacattggatggaggtagggaaagttggacatccagacataggtttataggtgagtagaaatcaggtagcattggggcgagggcatgaggcgctttctaatgatgcaaagactgggttttacttatggaaacttgctgtgggccatgtggaggttattcgttttctgtctcttcaaattcatgctggagggcaccattgattttactcccacactactcgtggaaatctaagtctcgggatggctcagtttattgtgtgagttcatagcgttggtaacatttgagctgagttaaaaggtgagtctgcctactttgaggaccagcttaatgctttgacttcatggaaaccctttttcctgtgttccacctctctactaaattgaagctctgggtatcactctggggtacgagagagaggagagctgtttgctatggagattggatctttgtgagaatgctggtttcccacagatacgggccatgaaaggatagctttttctatggactctgtctatgctgtgatgcatataaaaagtcattgttactaacaaaaacaatattgatgatgaaattattatacagccaagtatataatttataaaacctcccgtggtatgcaagatatggcggtgcatgctgttggtcccaggatgccacacagagatctctgtaaattcaaggccagcctggcctacatagggagttacagggcaaccaggaccatattgtgagaccctgttgtatccctcccatatccatccttaaataactcaaaaatagcttcaggaagtccctgaaactgagcagatccagtaggcccctccctgccaaaataaaagcaattaaagctgagagttgcctcagatggaaggggattgaactccaagaatattctcagacacgacaagctgagaagaagactcagaccagaccagatgctcgaaagaagcagaaaccagcctagctgcctgcacaacatttagatcaactgaggcacctggaaaggacactctcctgcctgttgagcagcctgtcgactgtacagtatgttccaggcttcccagcttttgttatctgtcacctatgctgaggtcggccttggtgatgcagctatctttgagtcatttctgcttctgtaagtaatgcctcacccatattcttataagcaaccccagtaaaacccattggtccaccaagttgaactttagccgtgtctgtgctttggtctgttgtgggctcattatctggggtgagtagatgttcatctccccaggaaaagtcttgtcacacagcagaccctatctcaaaagaacaaaataaaactcccgtggtacatatgacacatacttggtgccagacaggaagcgcctgctgaccctggtaaggggatacttgcagaggaagcactgataagagactccaggcatcaggaaagatgaaatttggcaaggaacctatcagggtcagattacagcacaagcttgctaggggaagaggacacagagagaaatgacaataaccacacagaggctagagggaaggcctgtctatcccattgggggatgggggtcagttgtctagataactggaacaaaacagccatggctatcataaacacaaatttgcttgaagacagtgtggtgtgttagggtggctgtggcctaacctcagaagaactcccttctggcttccatcattgctacagcagggaattctctgcttctggtgctaaggaagagaggctttcagaatgagggacggactccgtaagtgactgcatctctggtgagttgccttggcctgtgttggcccctcataagctttgcatgcactctgtgaagctcgttacacagttgttaaagctgatatttgtagctccgatggcttcgctacctgtagcagaggatacttagcagaggatactggctagcttgtactgtgtggtgaatgacaagaacaacatctctggagggatgactgggtcagctgggttacagctcctcaatgttggcctcagccttccttcacgtgtctgtcatccttctatcaacccagccatgttcttctagtgatgacagcaaagatggcttgggttgagtagacacgccctgtcccttttcactggggcttgagaccaacaggtggtctcttctacctcatcctgttggccaaagcaggtcacctgactcaaactggaggatgaagaaatagtcttctcctttattataaagtgcaaagtgattcccatgacaagagtgagactatagggaggaataatgaataaaacccagtaatgcaatctatcctaaatggtatttatgaataataattagcattcgtaatactgtatgccagcattatgtgtatgaaatattaactaacatttattaagtgtttacaatagattaccctgataagtaagctatatgtgttagctcacttgataccaattgcactggtaggctatagttcctttgattattctcacttcttattcaaggaaacagagaggagataggtttaatgtcctgtcaaggtcaaatccaagcaatttggccacaacattcaggctcttaactcccaagctgtgggtgatctatgcttgcctgtgtaccatttgagaacacaaagacccagataagtcacttgtctgaagtcccttggaatcctgacctgcccctgatcgctatgtgctttctacaagctagagaacactgaatgtctaagtgaggagcgactcagttctgctaattgattggaaagcctcaagtataagattgacactggaacctgggagatggcttaattggccaagctcttacaaaataaggccctgtgcccacactcctagcatctatgtggcggatccctggggcttgtgggccagccagtttagctaaattggtgagctccaggtatcactgagagatgttgtctcaaaaaataatgaggaggcctattgatgatgacatttgatgcgagcctcttgcttctacgtgagtgtacatgcgcatctgtacacacacacacacacacacagaggcagactgatatcgcttattgcttgtacagaactcttgttagctttcttcttggtcttggcagtttctttatgataccttggagctgagtcaaaaaatgccttcctctacttactgattaatacttcttgacaaaaagagtatgttcatatacatagcccaaggaaagatgttagcattcagacatactaactgaagaaggctttgtgtttttagtaaaggttaattaagacccatcaaaaattttccccttaaaacataaaagtgaaatcgtgtaattagctattttcccctttcccccccggagggcatacatgaatgtttcagctaaatgaagctatttattgaagtccatccagattttctttgaagtttcatacatctttcttctactctatcggcttctagctacaataatttaataagtttttcctagggtgaaattggatgccctttatcgatctttcactgaggggcattcaattacttaatctaaagtggtatttctgggtctctccattacaattttgttataaatggtttgctaatgatgcctggtgtacataggttaatagggggcatccaagcaaaggctgggtaattgaatgctttctatttggggaccagttatctgatctctcgcagtggcactgggttcccacagttttggtctgcatccacggggtacagcttggagccttggctgggaggcggcagggctgtaatgtatccctgagtgccttggttgactacatgaatgagcaccagaggttctgtctaacctgagccgactggcaccaagcgctggcattccagccaggtgaagtacaggtgggatgcattacctgcttctgaggggagaacacctgagtgttaagtttctgagtggctgtccctgggatcatctgtactgtgtgggaaaagccagttacggggcatgatagcgatccattctccttctagtacagccacatgaattggatttttttttttcattagctgtgttatttaatagctacacagattagtcagagccctgggaaagaatatgtagcatgcctcgttttatgcacttgggccaatatcacccttgacaccagctttcaaggctgtatagaatctaatctctgccttagcctcgagtggtcgataccgtctccaaaccagcacaagtccccaatgatctgcccacaggtggttctcagctgctttgatttcccacagagcctccccctcccttggtttcttcatttccatgaaactttgtttctgtcatgtcccccaaactctgctcaataacaactgtgaagtcacactctgctcactgtgcctgtaagacaggctccacctggagaataggtccccagggccaccttcgtctatgtctggatctggttttgcttaccctatctcaggaggataggttctactagcatctagccttggaggccagggacagtgctgaccttgcatgtcctacagtgcagagacagcctgtgctgtgaggaattatccagccaggccttgtactgtggcactgagtgaacagtggtgtctaatggtttcactgtttgggacatttgtcacctgaggttatcttgtgtacttgtgacagattgttactcctgcagtgctcctggccaaggtggaataaaagccagctcaggtggaagagtcctctgtcatgggcctctctgctcctttcttgtctgttctagggattggcttgtccaggggcactgaagattaacagcctgcacttaaggggcacatttgacttcattacctggtgactggatgggtcttaatcaactttattgagatgtacttcacatatgatagagtgcctgtatggttttggggatgggaaagacagtttatatctttttatttgtttgtttgtttgtttgtttgtttttaaaaagaagattctgttcccttcctccaaaagtatcatcaacacaaagcacctcaacttcttgataccagcctggaatcttgccattcaaggtcaacaccaaacgcctggagtctgaggtcccattcccaagagattgctccattttagatccccagcagaaggattttcagcacccacactgtgactgaactggctacagaggcaaaggttcccatggtttcctaagtggtttcaggaagctcccagaggaataaatctcgacccagaaggtccctagcagcagcatataacaagaatttgatcaggactggtcagcagtcaggcatagggaggaatatccatgattctcctggcttcacccagctctgtgtgcttatcagccctgaagcccttagatcccagtgactttgagtttgagcagaggtctcacaacatagagatggcttatatcatccatctatcatcagaggtttggtctccagctcttcttcatcatacctgggagtttaagctttaaccaagccttggtctttattgaaaggcctccatcttgaagctcctgatggctcctggctccactaagggtcacgtcgttaaataacctcagctgtgcttgaaaggggcagctcctaacacccaagaaagatgccaagcggtgtgcttgggggatgaagctgaatgccagctgtacatgttggtgcccacatacctacatgcaacattttctattgacttctggtccccaccctaggatgtgctcagcacatagtcaaccttcagaaagtatgtgctgaacaagtgagtgagtgaatgaaatgaggacacactgcattagagtgtttttggagtattttctttaatgagtaaaaaacccatcctggagtagtttgcctaactggaggtacaacttctagatagaggagcactaggcatgtttgagcctgtttcccatcccatccacccccattaaggttgtcagcctcctccagtcctgggggttatttactttgcttaaaatgagatagcttagctcttggttaggaatgttctgcccattatgttgggttcagaggttgtacgttctgtggcttcaaagtccttgtttgtttccccctttcattcttaagaaaacaaaaacaactaacagtaagacagaagagtgtgaacactctcccactgaggccctgcttggagcctcaatttaaccctttaaaccttggccttgtctttgaaaagtggattaaaaaaatgttttcttggctccgggggatggagtttcccagagggaagtggtggtggatcttgcccttttgtttctttaatttggaagaattgtttgtacccagcagtgggccaggggtgatggagcaagctggaagcacaagttcctggcttgctcaccagctgtcctaagggaggagagggacccagcttggtcccaggagtctcctcccatgttcctcaagtctgcttctcctgttgtttcaggctctgtctgactcttagctcctcagaccagtacttctcaatctggcctcctgggtttagtgataattccttgaacaactctgtaaagagtgtgtgcatgtgtgtgtgtgtgtgtgtgtgtgtgtatgcttgtgcgtgtttgtgtgtgtgtgtgagagagagagagagggagggagagagagagagggagggagagagggagggagggagnnnnnnnnnnnnnnnnnnnnggagagagagagagagagagagagagagagagagagagagagagagagtgtgtgtcctggtctttcaccttctttgaggcagagtctctcttgttcactgctgcatatactaggttaactagccctgcaaatgtactgattcctctccccagtcctgtacaatgtaacttttgtttattatattcctggctgtggatttgcaaggtgtgttctcatctgagcaattcacaaagtgccgctgtaatgaactgtatcgaatttatccagtgcaccttgcctctaaatatttaagtacaaatgctgtcagtgtgcgtaatactctgtaggtggaagaaatgccacttgactcattctttgccaatgtatttcaagaaaacatgggctttggatccaagtgacatgaaagtttctgctgtagggtagtgactttaatctctggccaatatatagagtgtgtaatgaagacttagttaatgccgcttctctggggacagagggttatttgaggagtgtatgagtacaatgggatgtgagtccaccgcccttgggtgattgtcagcctaaggataaagaatgtggcttagggtctcccatgtggaattgcatatcaacacttttagaacttgccggcaatgaaagattgtaatgtggccagtgatgatatctgtgttatgtacattcttgggtcactaaacacatgtcaggcctatgcaaactctttacacacatgagttctgtgccttaaaaatgtcacatggaagcactgttattattctagttttactggtccttgaggaaatgagaactcagagatgttgaagagcttaaggtcacacagcccgtgggtgtgcgtgtgtggcagctagaaaccacgtcaagctctttcattagttcatccattcccctttaatgacatctccaaagaaatgtcatttgggaaaaaatacattttagagccatggcattatgttaatggatttttaagaatcgtgtctttccagggatgaggaaagtgagaaatgacttcagggtctgaagtgtcccgtggcccgagggaaaactgtacattggctttaattgcttaataacttaaaggcagatttttttttaatgtaatacacttgactgagaagaggatcatttcattgttgctaaattttcattaacttttgcttcctaagctgtagctgagggacggcagaagctgtgaagagacagcctggatccctgggcttccctcccgcttccatctccgtccttcccgctcttcagacttatcactgagtttcaaaacatggtactttgattcatccctcaaactcgaagtcattgatggtcttgattccctttgttttccccttccttccttccttccttcctttcnnnnnnnnnnnnnnnnnnnnnnnnnnnnnnnnnnnnnnnnnnnnnnnnnnnnnnnnnnnnnnnnnnnnnnnnnnnnnnnnnnnnnnnnnttccttccttccattctttcttcaacttgacaaaagctaaagttatatgggaagaaaaccctcaattgagaaatctccatcagattggcctgtaggtctttagagcagtttctgacaaagctcaactgcagttgtaccggccctcagctgttggccctgggttgtgtaagcaagcaggctgagcaagccatgaggaacaagccggtaagcagtgtttctccatggtctctgcttctgtccttgcctccaggttcctgccttgagttcctgccctgacttctttcagtgagggactgtgatgtggaagtataagatgaaataatccttgcctccccaagttgcatttggtcacggtgttttgtcataccagcagaatctaattaagatattgactgtgcatgaatctgactgtagttacacagtcttgagattctgggatgccatcgctcagatatgtgaaagcagaggccctggagggtacatgggtacaaaggctggtggtgggggtcacatttggtgacagaacatgaaccccaaaccaagtacaaaacccctaaacacctccatttatcttatatgatctgtaacttgcttatgaacaagtaagtgtggctgaaatggagagatggaagaaggagataacacgtgctcttttctgggaagcaacttatatgctatcataatgtcttagtcagggtttctattcctgtacaaacatcatgacaaagaagcaagttggggaggaaagggtttattcagctcacacttccacattgctgctcatcactaaaggaagtcaggactggaactcaagcaggtcaggaaacaggagctgatgcagaggccatggagggatgttacttactggcttgcttcccctggcttgctcagcttgctttcttatagaacccaagactaccagctcagggatggccccacccacaaggggacctccccccttgatcactaattgagaaaatgccttacagttggatctcatggaggcatttcctcaactgaagctcctttctctgtgataactccaatttgtgtcaagttgacacagaaacccagccaggacacgtaattaccacatattgtcacaaaacttgtctttctttatgtctaggtcacctagcattggtatgaatctgctcctcaagaagagaaaatattctgaaggcatgtccgtttacctgtcaacgaggaacccataatgtcttctcatctccagtgtggctccatgctctctcctgatgctactccaactttctttggtgccatgggaaaaacctgaagcacgagcagagtcacctccaaatctgtgctcacttcattttgttgcatggctggtgcggaacagactattggaatttgctcctgtgtgttgcccttcgtacctgaaccaaagactgtgcctcattctctagtgcattgctgcctgctgtcttcctcgttcatttctgttgcttgtgccttcctactgtcttctgtcatcacaggacacccttaaagtttctcactggactcctcgagggctggcccatggctctctaagccagctgtccaaggtctctaccatgaggcattgcattaattgctgcgtccagctgttccccgaagacacacacaaacagcaagttgcctgccaaggaggcccccatcacagtcatcaggcgtgccccacttgcaaaggagaaaacaaaattctgtttcgtgtggacagtaagcagatgaacttgcttgctgttctcgaagtgaggactgagggcaatgaaaactggggtgggtttttgcgcttcaggaaggggaagcgatgtagcctggtctttggattgataataatgaccttggtgatggcttcttacatcctttccggggctcatcaggaacttctgatttcctcccctttccattatgggggctttcccagcaaccccagcgtgatggatggtgagaaccccagtgatgtgaaagagcatcactaccagccttctgtaaataacatctcctatgtaaaggactatccgagcattaaactgattatcgacagcattgctgccaggattgagttcacaaccaggcagctcccggacttacaagatctcaagagacaagagttgcatgtgagtagctttctgtcaatcttggtgattgacttttacagaatggatgcttttttccctaccaccatctttgggaacacaggaggaacatgacaggcatttcctggatgtcttactgcaaggaatatttggcagcctctgggatgagaatgcatggtgtgcttgtgctgtggaattgccaaggaggagatttgctgtcccaaatggctttagagatgcttaaagatgatcccttctcatcactgcacacggggccttcctgtctggaatggggctatggtggttcaagctgcttttgtagatcaccggcacttagtattttttttgaaaagatttatttttagtcgtatgtatgtatgtgtgtgtgtatgcatgcctgtataggggtatgtgcgtgtgagggcagttgcccttggaatcagagtagaagcctcatcccctggagctggagttccaagtggttatgagctgcctgatgtggctgcagggagcacatctgatcttgtggaagagcagtacacactctctaaactatcgagccacctctccagccccttcatttagattgtgttgttgttgtttgagacatagtctctctatgtagcctagactgtcctagaactcactctgtagaccatgctgaccttgaactcacaaaaacccacatgtcacccactcctagtttagaacatttctgctaattgttttcttttattgtgcctgtctcctttgttcttcgattgcagatgttttctgtaatccccagcaaattcctcccgactagcaagagcccttgttggtatgaggagttctcgggcaggaacaccactgacccctacctgaccaattcctacgtgctctactccaagcggttccgctctacctttgacgctctgcgcaaggttttctggggccacctgtcccacgtgcagggcaagcacttccgcctgcgctgcctgccccacttctacatcattgggcagcccaagtgtggaaccactgacctgtacgaccgcctccggctgcatccagaagtgaaattctcagccatcaaggagccgcactggtggacccggaagcgctttggtgagtgttggctctcgtgtttttctcagtcattctgtggatgcatgtgtggctggtgagggcacagcggcatgaggttctgtggaggaaggcgtgcaaggtcggagagaagatatattgagattcagaggcatggcacctgtcgtgagacagttgtattattaatctgttttgtaatataacgacaaaacaccagtgtgtatttggttcatgattctagaggctaaaggttccaaaaagtctgttgttgatgtcctggtgagaggctgttggctatgtcacaagatggaagagtaaggaaacggtgactagccacatgcagcagaggccaagttcatggtggggcctggctttataataacccacgttcacaggatccaagtcagtgcagaagaacagctctaaactctttccaggcagagctcccatcctgtattcactttccattgtgccctgctttttaaagggtcccatgaccctcagcatcccaccctgggtaccagccttgccaagtttctagcatgtgagcctctggggaatgccctcaaaccaaagcagcacttctcaggcaaagacctgctcattgagcactggttgtatgcagctgtggggagggcaggtgcagaatcgaaacttctggtggaggtgtgtttgtgtgtgtgtgtgtgtgtgtgtgtgtgtgtgtgtgtgtgtgtgagtgtgtgtgactgagagttacatccctagctcttttagttgtcctgaagaactttaacacacaaccttagcagagctcaatatatgtcagggactgggggtggctggcacccagccttgggctgctttactgaagccagcacacctggaagagacacagcttcaggccttggctgtatgacctgccctgactacctcatgtgtttgcaatgcagaggggatgtgttcacccctggtcaacaaggttcactgtgggccctccctgccctgcccctccttgtaggctggtttctgttccacccagtcctgggcaccctgtggccctcggtcactgtttcctgtccgtaaccttttctttctgccaggagacatttggtcactgaagctaatgggtgatacatggcctgttgtctgccaaagtctgggcgggctgtgaaggcagtttccacataaaaggactcaggtcactagaagagaatcttagacattttctttagactaactgttcctgacaaatgttcaatatcatccttttggtcttcatttctggagcggctacatgtgtgtgttgaagcaggcaggctacagtagacaccaagtaaccaaggtctaatgcatttgatgcatgtaacacatgcttcccccactatgcccagtgtctctcctaaagagaaacagctttttcctggcaggaaggagggaaggacagggcatgcctctacggctaatgctcaacgtcaccttggatctcttgttattttggccagaactgtcctcattctattttgcagtagctttggtagctgtggtgctgggcagtgcatgttttgaaatgtttatgagttattttaaggcagggagcaaatctcagatgtgtgtggcatgtggcagagtctgtgtccatggagggaaccaacgagaccgttaattcaccatggctgcttgattggagtacatccctatagagtaccctttgggtactgaagaaagaggcactacagaggtgacaggatgctgattccatttgtcctccatatttggcacaccaccagatcctaggtgccgccattgttttactctcttggtaaaaatattaagcagttctcaactttagccctccacttatcccttttctacctcttgagtaggtgtggcatcttttaagtggcccctgcccagtggcagtggtagttggtgtctttctccctgtgaggcatgtacacgttgaagcaggcaggcattgacagagctctccatcccacagctgtgtgcctccccaggagcttccctgcatcaagcctttcactgctaacgtcaggtccccttgacctttctgtccttctctggacttgccttaggaggccaccacactatcagcggcaacactgtctgcagtaactcacttcttggttcctgcaggaattgtccgcctgcgggacggactacgagaccgctaccctgtggaagattacctggacctctttgacttggctgcacaccagatccatcaaggactgcaggctgcctctgcagagcagcccagcaagatgaataagatcattattggtaggtatggcttctgggtaccttcaggggagctggcagaagcagactctttggggtcctggtccatgtcctggggtcagctctgcttcacctacagattatttgcaggtgagtcccttcccgctgtggctgtcactgttagcaccaggtaaaccagtcacaccatttataccgttaccataaagcagaatcatttaatgagcttgcttactccatgcagactcaaggatggctgaaatggctttttaaaagagctgccatttctttgtttttcctttaattaggcaggtgtgcattcattcctgtcacgataccctgactggagttagcattctcatgagtcactgattggatgccagggcagcaggaaggagagctctgcaccccctgggatgaatctctgggtaacccgagtgcctttgagcattcaaaatgaagttgtttgagcagtatgcgctcaggacatggaggcaggagaatcttgagtttgaggcttgttgggttcattaccaagaccctgcctcaacaaaacaaaaccaagcaaagccgaacaaatgaagtaaacgtgaaaaagtaagccaggtggtgatagcagcttgtgtgcctttaatcccagcatttgggaggcagagacagacagatctcttgagttttaggctagcctggtctacagagtgagtttcaggacagccagggctacacaaacacacacacacacacacacacacacacacacacacacccctatctcaaaagaattagctgtttatacttagatatactcacttttatacacacacacacacacacacacacacacacgatgaatgattattgcagctaaccaaattagcatatttgtttcttcacagcaccctcccaaatcctttgcattttttaaaatggcaagcatacccgaggccccccctcagtagatgcagcacacagtggggcattgccatctccaggcctgactgggctttggattagactcatttcacccgcaagaacacttcatcagcctcggctcgggatgaggcgtttatctccaacgccttctgaaaaggagaaattgaatcatacatttcacttaaattcgctccccgaggcaatgatctattttgtgttcctggatccattacattttgattctctaaatccaatgaatctcttcgtgagtaggatggattgtgaccagccgcttggctgaggaccctgtacctgactctgaggagattctggctcctgctaaagcccagagtgatcagtgaatcaatttttttttaattcataaataaaatctcagggacccactgggaatgtagtctacctaccctcacatctacagtatgaattggctattagtttttgttgttgttgttgttttagtttcaaactcaggggtgcaaataccccatttaataagtctaattaatatttttctgagactcccattccatatgcctctggggaaatctcaggatctatgaaagaactaaaaatattccccacaaagccaagaaacagacttagaaaatgaatgagagaggaaagccttcgtttgggttcctaattatagttactgctatatttcaaaaagaacaagaaataaaaatgccacgctgatattcactccaagccaggcttggtgctgtgtcttatgagagcctcttggtgtgacaggcagtgtggagaagcagatgacaagttggcatctggctctgcttgtgtcaccagccagctctgtgccacgtgatcacttaggccttccttttgcatctggtctacaaggtctgtaaaatgggatgattggaacaggtcaggaccctgcatctcccagccctgggatgtgactcagccctttttagatctgcttcccaatgaaggccttggcagaggtcaaagggtcacagcaccgtgggggatgctccggtggtcagaggaggtctatcctcctgcatctgctgataggagagatactcaggggcccaggactgaagcagccaggttctgtggggctgtggttgctgaaaggccctgctctgcctgcaaggtttcttgtttctttccactcacttggtagctaatggtttctggaatttctgatttcctcttagaggaggcagtctatgcctgtcttgtttccctcatctgtcctcggtgccaagatagcaagggggcagggactagacatcaaatgaatgaaggctgagatgaagagaagatggagcaatcctgcatgggtctagaagcagcccccttttgagttctgacagaatttgtggcaattttttttcagacactccacttgcagttcatatagcctacttcgtctgaagcaggtttgacaagggatgtctgattggcttgtctttcctctctttgttatgttaaaaaaaagccctaagaaaggagagagggctgggatgcaagtgttcaccgatgggaaaccaagcagaagatacaaggcccactgtcttcacacatgactgttatgtgcatatcaccaactagagaggctcatttagctcagactgtccctgattgagtggcactgagatgttgtacatggtctgtccagaaatcaagtgtagagttgaccggattgttcatcctgaagaactgtgctggggtagtggtagcatggaaggggtgggcaccagaagtcctctgcctaggtccttggagttcctttccttctacatttctgcagacagtcacgaaaccaaaacaaagagaagctggcttgtttgcaagtgcttgctgtacaagcatggggacctgcgtgtggatttccagcaccatgagaaagctggatgtggcgataagcttctataatcccagtgttggggaagtagaggcagagccatcctagggcttgctggaaagcctgcctaggcagttggcaagctctgggctccgtgagagacccagattaaaaaagattgagcaataaagggagagagacattccttgctgtctggtctttataagcaggtacacaatatgtgtgcacatagggatacagatgtcatttccccatgttcatactcaaacgcaacaacagcagcaacaacaacaacaactagttcaattatccaagagtctgtgttgtttaagtgcctgcgtcttggcctcacctctctccccaaagctgccctttgtgtttccatcctctcctgtcggggcagactctgattaaacagtgttgggccctgttcatccacccagcatgaagtgctagctgtataaagagcagggggtgaggtatgggcagtagacagctggccattcggggaagcagggctgaggctgagacccccctaggcttctggcaaagtcttcggctcatttggtcctagagattgtgcccgtgactaaatgttccggttccaaggaaagatagatgtgaattgcatccagctttccactgaggctcagattccccaaatgactcttttctcttcctgaacattttgaaggaaactttctagtggattctcagtggggccttaaaaggccagagagctatgagctgccagcaaagctaaatattgtgtaattgaagtcctaggtgttaataaagtttgtatttttgttccttctgaggcaagaagctggggttgggggtggctccagtaggggtggggaccagttgtccttttatcagagtccgggagttccatctgccaacaatggctgataagcttgccgtcatggctatttaagaggaaggcccaggagccaggcttggcctctggctcacagtgggagctcataccccaccgcccagcatctgctctgtgtctgtttgcaggagaggccagcgcctctacaatgtgggataacaatgcctggaccttcttctatgacaacagcacagacggcgagccaccattcctgacccaagacttcatccatgcctttcaaccagaagccaagctcattgttatgctcagggatcctgtggagaggtgagtgtgtgtgtgtgtgtgtgtgtgtgagtgtgtgtgagtgtgtgtgtgtgagtgtgtgtgtgagtgtgtgtgtgagtgtgtgtgtgtgtgtgtgagagtgtgtgtaagtgtgtgtatgtgtgtgtgtgtgtgtgagtgtgagtgtgtgtgtgtgtgtgagtgtgtgtgccatgttttgcattttttgtgaaaagaaggggcttttgggagtgcagtgcttccatctctttgcagataagatttgtttgtttaagaaaaataataaacaggaatagcttgtgacgttccttctgcttattacataaatgttattcttaaggcaatcctccgtgcatttaaacaaattgtggtctactctctcagcagttttgactgtggtctgtgggtgttagcctctgggggggaatctagccaagtgatgaaggatacaagtgctgttaggttttggggatatccttagtgtcaggggtgtggggattctctgtgtgctctgactcccagaattccttgtttctttacttggtggctcttcttcagctctgaacatgtacccctgtttccctagaaaccaaacagggagtactcgactggcaggctgctctgcggctgataaggtcggggcttacccaggtctgaatggggcagggctggtgcagttgaacagacagtaccaggatggtgatgtcaggtgtgcagtaaacttccaggacatttgtcacttagtctgctgtgccctccacatcctgtcacactaggagtgaggggggtctccactcaagatggccagtctaggtcagaacagctcaggttcctatctgtcttgtccacgccttgtccccatttattctcccaagccatacaaactaatgtaattattttaaactctgacactcacagacaatgcctatagtttttgatccttattttccattttcctatgggttgaattatgacccctgccccatgtaagatatgctgaaatcctggttcctggtagctttatctggaatttaggacttcacagatgaattgggggatttcgtgtgtgaagggattgaaggatgtggtctcaagccaagggatgccaaggagggcgcttttattaaaggctcggagagaggcatggaacctcagaagcagccagccctggaaacacctacatttcacaaatctagcttcctgagtgatggatgaagagcttcttgtcatgtgacagtactgtgtagcactttgttaccacagccctaggaaatgcccatttgatttcttcctcagatggcatggcttcctgggccccactttaacaattgctgtgcttattgtaaaggtatacagggaaggatagcatctgaagctataagggaagtggcccatgtatgatctcccgtgtacggaatgattagttacgtgttctgtgtatccttccagacttctttcctatcagatgcgtgcatgtgccatgtgttgcatccttgagtacatacggtcttgtaagtgtgcagtctagcttctctcatggctgcccaagagcatatgcttgcctttcccatttgctgagctgagtatccaaatcctcacgaggctccagaagggctccagctcttctttggaagattactggacagaggaccatctctctggggcagtctcctgggtccataccaaggggcaaccaattcatgttgttccccaggcagccatgtctactttctcttctaggcaggaagttgaccctcttttcatggagtgggctgggtttttctggcccagaacagctgggctggggtacattcctgtggacaggattgcgtaactctgcaaaagacaggcttgaggggactgaccctcaccacccgctgaggtattttgacagctgcttctcctccatcccccatgccacctcagcccaaattccctggtagaacattctctctgatcactccactcctcctgactgttcttcccgctgcttagttctgagcagggtcggatagtgcccagtttcaaagcctgagaaccgaggctttggcaagcactctggacaaatgaggactgagttgtcggactggcttctgtgtgcaccggccccagtacctgtctactggaactcccaggctagctggagagacagatgtgtggccactgtttgtcacagtcctacagctaaaggggagagagagaggagaaagcttgcaagcgccaaggacccgtcaattagaggagctgtttctgggctgggttttgaaggatgagtatgagtttgccatacaggtaaggatggaaggtaatccaaggagaaaaccactctgaggagaggagatgtcacatttagagacgtatgtcttcttgttgaagattgagccccatagtatcctttcctggtactgtacctccagctctgaggacagaagtgccaggaaattgagccctggaacatcagggcagccatgctagcgaggctcagacttgtggccggaagtagcacctggtgtacctgccttcctggctggtggtggaactgactggcctgctctggtttcctttttgcttgttttttttttttttttttgttaaggaacaaatgacctctgccagaaaccaaaggtgaaaactttcatcctttcttgtcctcagcttagcacaaatatgtcatcagtgaaaacactcatgatccctggctgcatgttaggtgctctgctgggtgcttagctgttgagtggcaagctacaatagtggtccaggggtggagatatcgactgtgtcatgaccgtgaccgtgaccgatgtgataattctggagcatggtgtgtgtgggggggaggtggcaggatgcctaataggcctgtgttaggtgggtgacatgcagtgttaggtagctagcaatgtgacaagctgctccaaggtgtcacaactcttactgcctacttactatctcagagtttctggggattcctctggagatcactggcttcatcactgagttttcaccttcagggttaaggtgtctgttaatgttggggtctcatccaaaggcttgggagggaggcggattaggtcccacactcacatggttgtggcagaactgggtttccgcagggctgttggagcacaggcctctgctcttttctttttcttttctgactcagctggaggtgtccctcaatccctgggcagtaggcttttccagaatggctaatgatgtcatcaaagcagcaagggagatgttggctagctgatcatcagtgaccaactatgatcagtcgccagtgtgccattccaatactgttgccatattttgtgtgtcacagacacatgccctggtctagcctctctcctgggtgcttatttcccacctggtgcttggaaacctggtacccgccctgtagcccagagaagagtaacttcaacttgatgtcagctccagcgccttcgggaagctgtcacgtgcgtgctgtgagttagtgagggccgcagctctgctgcttcttaaacattaccaaacatacgcaacagtgggaagttcgacttttgaaacccatagctcatggcctatctggagtggccagctcagctcctttcctatctcagccagaaagaatgataaatagtgtgtgtttaggctactcttggagaaacaaacactagagcccatgtccccattagtgaaactggctcctgggcctttggcctactttagctgttccctggctttgccttctgcacgtgggagattccctgggctgatccatgccagctggattggtccaaatggttcgtttagttctacaagtcagctgaggtggaggagggaccgtttgtagtttctgattttcggttagcctttgtttctgttaactgattgaaggcagaggggttgaactgtgctggggttggagaaggctaatcctaatgacttttaagttcccagagaaagacagaagcagtaaatccaacccccaccctggggggagatagaggaataatgaagaagtcttggggtggggggaggttcgaatggcagaggcttgccatgaattctctctgtaagaaactgcagcaatttagagctaatggtttcctaggctaaattgtccacttaattaaaaagaagccaccaacagacaagcagaaattccttcacttaatccttctctggaatggcccactcttctctctctcgtttgtgagcagagattgcttcctcatgcagggccgccaccgctcccccagtctatatgaggcatggctcataaggaagatgtcgactcctgtacccctgtcacatccttcttctgttcaagggacattaggagaggggccatgtaccatctgttaaggcttttatatgtctacagttttgtttttaattctgtgttgtcatagcacgatgctcagaactgaccatccaggaaagattgctttccatatttcatgatgatgggtctacagggaagcagggctctactcaattaagtagacttccattttgacccctaatcccttgggccttgaagcctggagaactgtgttcttcatctgcttatataaactgactttttagtgactgtctggactgggtaagtaattaatctacatatggactaggaagggaaggaggcgttggatgaatgaagtgtgcccactcctttgtaattgtccatgctcactgggagcacacagtagcagtgaggccaagcagttgaatagagatgtagacttgattgagtccccgtagtctgcagaatatgtggaggcatgcaggcagggagcaacttctaccactgagtgtgtatatagatgtgcaagcgtatggtgcaccatagggaccactcctggatacccagacaacttgcctccagatcctgccagtcatggctttgccacctgaggcaagaaacttaagctatctgtgtcttatttcctcatcagtgaactgggggagtgggctgttatttaattaaatgtgtatgcataacattcactcaccaaatgtgattgagcatttgatgctaagctatgttgagctatgatctgctttgttgagtccatggctagtggaggtgtgagcacaggcttcagcaaggttggggcccctgctcactcacctgagtgctgtgccatgccctgctcagatcttgcctcactggagttttgtcagtgggtgagagggggagtctgacacacgcacacatgaggtggaaggttctcccaccttatgttccttacctcttcgtgatgagtaagtagctatcacacctgagtctcacagagccaaggatttgtcccctgtggtggctccatcctagcatgagcactgaagactgctattgtatgaaactggattcagcaaaccactctgtgaagacaggacagggggagcaagggtgggtccctgatgcatcccacagaggcatcagatgactccatggtttttttttggggggggggcggctatgatcatccttcatcattgtttctggttggggaagttctcatccattagccattgaatgtgaattctttgtggatgaggtgagtctttcaggtgaagtgtctgtgtgtgtgtgtgtgtgtgtgtgtgtgtgtgtgtgtgtgtgtgtgtgtgtaggtaggggctgttctcgtaagaaaggaggagagatttctggttttgcaaactttgtgtgagcagcaaagatgaggagatgggggactaagcctagaccagccttgttcccttgtttagcatccaagagagcaatgtctgaactagggaaggggctggcccatggaagcctaccagtgactgtgactgcagatctttgacctgaggtagggaccacttgctgctaaaaccttcctcccatccaggcttctcctggcctgggagcactggcttcagaccactgagcagagaagggtcatttgcagcagccataccacataccagcctgtgtctttgttgggatgctatgtgaagactatctgggggtgaccaccagatgaggggctataacttgtgattggaagatagactttgggacttctatccttcagctttcaaactttattttgaaagtaaatttaccaggccattggccatcctgcttattctcacagagactgtttgcaaaaggcaattcagtggggacagtggcggaagtaccgtggaacaagaaaaatgtttctctacctgctgagatgggaagggggggggctgtcctgatgggctggcatctgggagtggactctgagtagcttgggggactgcacagatttgtcacacatgattccagggctatgttgtaggaaggtcagtgcatgtcaaccattgaccagctctggtatggtagccactcattcaaaatgagggtcccacaccccagacctaggctgtcttggagcctcctgattttgacaggaagggacatgtcagaagtcactcacttcaactcacagacacacaccaaatcacagtcttcaatgtcaggctcaaatgccaaaaatacactgttctgtggcttcctgggagggaatgaatgttccttccagtggctgctccgtgcctgacttctctatgcctgacacctatacagtacctctgccatcaggatcacaagtgggtagtagtgagaggtcttgtgtaagccctaggtcacagggatgccagaagttcttgtactgtcacccattccatgaactctggtgtgatgaacacactggacgatgcagaggtagacacaaaacccacctctgctcaagaaacctgacccgatggcgggtgggaaaaggaaagccctcttcagtgtcccagctaatgaggagccttgtgtcacttagatatggtacatctcttaactggataacatgtgccttcttggtgtcacctgtctggcctaaagtaaccctagacatttctccaacccggccccagcctgccctgtctcatcgtagtttttgaatggtcatggtttgtaattctagaagacagaagagcttcttttaagctacatataatggccagggtattttttcccttgtaggaaagatatctatgattattgatgaaccatatcagagtctgggattgactgtgattagaatatggatgctggcaaatggggactgaggccagctgctctggcatccatctccgagtcccattatctatgaccctcacatgactatgacacggggagatggggtgaagagttatttggaagatacaagtgtgtctacctttcaggggttcttgggtgaggaaatgcagccattgacgtgagagggtgtcaggttggtggggggagtgtgtggaggtggttgtggagctgagagaggaaacagcgttctgggggaagccagctcacgaggaggcagtacacccaatggtcatgatactagtgttagccatggactctttcccaaaatgtatctctgagaagtcaggcacagagcagccactggaaggagcattcatgccctcccaggggaagccaccaaacattgtacttctgcatttgagcctgacgttgaaggctgtgatttggtgtgtgcctgtgagctggatggagtgatgtctgacgtgacccttcgtgttaaaatcagttgctgctcactgggtatcgagcaatgttctggaatcagatcatgttgctggttgtgcaacgttctactgactcgtccgctgagtcctatagtgcgtggttgtatctgcctataaaaggggtaggagcaaaaacactatgaaaagagaaagctgctgcagagggaggtttcaccacactagtgacctggagcctgcatctgcagagtacccatatggagaggagggtgataaagagaccggttgtcattaggaacaaacagtactgacagctatgaagcgatgcaagcaccattagcctgtccgagtgataagcgaccacagcatgtgcccatgtacgctgggctccagaatgcccatttattgctgttgtcatttttgtagatgagcatggtggcacgccgtgacactggctttttttgtgaccatgggcagcgccattcctcgtgtcatcgtgtctgtagcttgatcacctgttgtaatattataccagtctcctgtgacttattaagcagttttagtctactgtgacttaggaagcagttctagaacaaaattgactctttgttttttttaaatcatcaggtacctaaagtgatagagacattagacgatctcctcaaaccattgactccaatggctggtgcccaccttggttagccgctggcttgtcgcctaccctaagtcgggagaggctgtagggcctgtgggctttggggctgggcagaccttggtttgtttctgtgatgtgtgacttggagtgagcccctgaacctgtcttaactctagttccctgtgatagggttgtggatctcctggagcggttgtggggacagaatgagaacctgtgagctatacctagcatggaccaagtccctcatgaatagtggcgggctcgaaatggagaagatttctggggctagcctaatttggcctttttaaagaccagggatcaacaggggctttactccacctcccctgcccacccccactgccccaactgtggagtctgtaaaacagagtaaggaagccaaccaagtactcaggcactgagccacaccccagccccagattctatttaactgccatcagtatgctgaccaccaattttgctaacttagaacagagccccttaactgagcagcaatggcattgagctacccacccaggtattatgtgatacggtgttgtctgtctctgtgggactaagtggtaattttaagaggagccctcttttgcccacagacacaccttctaccacctctcctggggttcctccacagcactgacaaggcatggctggccctcacacatgcccacggttacagctctgcaccagcaggcatctaaaataaccacagcacagaaggtctggcgtgttcttgggcttatatttggaattgccgttggaaacagtcttggccaaatgtaacacccatctgttcagagtggtttgagactgagagatgaggtggatggcaggagggggttgggcggccctgatacagagggctgggggctttcagacaccctgccccgcttgctactgtaaacccctcatcccttccagtctaggctgctggagcctctgccctcctggagaaaattccccttttgtaaagccttagcttcccactcatgggtctgtctgtccttcagtggttcagaagaccagccattctcctgagtctttatttccctgaggataccggcccttgcccttgtaccaactggcacccggcactgacagctttaggtgtctctttagctgtcagattgtctgtcactttcctgtaccctccccagacttttgctgctgtttttgtaagtgcaccctcaggtggcatcattgtccctacagtcctgtgatgattcataccgctctgtcttctacgtcaccacagtgctattgatgttaaagccagaactctgagtgtttaggtctgtgtccttccattgtatgttgctacactcctgtcctgttagatacccattcttgatttgctgtcattctctgaggggctctaattatccaagcagcttgtcactcacccatggtcatcagccttgctgatgttttgtccttgttccttggaggactcagttcctgccgtgaccccacctccttgtttccttatggaaatatgacctcatgccctttctgtacatttgggactgatgttcagggtctctggaggagagtggtactgaatcatcttccttgggttagggactgtggggttcttctagggctgctccagtaaatcatcccacactcagtggcttaaagcaacagacattattttctatcctggtatggagattggaagtcagaaatcaggatgtcataggtttataccctttgctgagtctgaatctgtctggcctaggcttatagcttctggtggcttttggtgctcttttggtgttctataattggctaccagagtccaatctctgccccataagtctcctttcactttgccatgaaagttgcctccactagtttaaaaggctaaaagatagtatacatgagtttgcctctgggtaccccaaacatgcaaagctatgggtaccttacccataccttaccttggtggagtgtaggtaggatggaacattgaacacatccagtgtttccccagtgtcttagtctgggttttactgctgtgaagagacaccttgaccaaggcaactcttatatggacacttaattggggctggcttatagatttagaggttcagtccattatcatcaagatgggagcatggcagcatccagacaggcatagtgcaggcagagctgatagctttacaccttcatctgaaggctgctagcagaacactcacttccaggcagctaggatgggggtcttaaagcccacacccacagtgacacacctactccaacaagactatacttccaaatagtgctactctctgggacagtcatattcaaaccctaacacccagggattacttccccatctctgaagaacttcatggactcagcaggcatttaacaacaaataaacaaacaaacaaaaaaagccaagtaaacaagaattgagacaggctttaattactcttgttttatttataaatcaaatgcctctaagaatggttattaccatagggggataaatgtcagaaggaaactttgggccaatgaccgggtttttctgagggagtttttgtagtagttctgtgggcatcctgagtaagggtctggcttgggcggattacatgcggggttgactgagagttggaacagctgcaactgtcattttctctggcacagtctcttggggtgagcaatactattgattgccggagatgctaagatatgcgtgaagcaggaggggtaccccatcatacgcatgaagcaggaggggtaccccatcatacatgtgaagcaggaggggtaccccatcatatgcgtgaagcaggagggggtaccccatcatatgcatgaagcaggaggggtaccccatcatacatatttccaagtgtttccctcagtctcagctcatgtgactggcctgtgtgccgaggtccatgcaaatgtgattactagctgtaactgattgccttgcaggacatgttctcattcaagtataatagttcaaccgatactggggccaccagcattggtttagttgggtggatatatgaactctggggatcattctgctcatggctcatgaaagcatggagtgctgggaagcaagttgtttagagagtcatggtggtttgttttgttttgtttcttttttcttaattggcattgtgattgtgtatgtacgcatgcgtgcacactcacgtgccaacatgtgcatgtgaaagtcataggataactttccagagttggttctctccttctaccatgtgggtcctgtgggggtccctgcaatctcttaagtccagcagtggaaggatccgagaagaggcaagactgaaacgcagttcagtctgactctagttagccatcattgattcatacttatggagtctgacatcagatggtatagtgtagccatatttaagcacagcacaattttttggggggggtgggggaaattcctgatgacaattaactcagtcccctgtgcacacaaagcttaagatgtatgtatgctgaaacttttttacaaagtacatacttttacaaagtacctcctgaaagatgggtgctgttgacttagaaacaatgctcaagataagggtgggagaagaatgcttgaggtaaacagattacctgtgggggtcaggattggcctggccctgagataacagagaggttacttagaccattgtaaaatacaaatgccaccgctcataagaatgggttttacgaactaagaaacaatgttcaagatttggtgggaaaggttctcggataaacaaatacaatatggcgggggattctggtaaaacctggtggtgcagatagaaaaggaccgccatgctgtaagctacagcctttccaagcagtgggtggaagacaggtaaacatttcctttatctgaagagacaagcctgcttaactttcctggcttctccagtgcttatctgtgtacacaaggacccttgacccacgatacgggtcccagggattgatctcagattgacagtctaggtgacagtcacttttatctatcgaaccattttgctggcccaaggcaaggtcttttgaaaagctggtctggccaggctgaggtaagcaaagcagtctcccaacctgtgtctgattttaggcaacctctgaggaaccccaaacaccctaagacatcctaaaagaacactcggggatccctatgaaatgtcacttggcttgctatggtgtcatcctgggtgagaatagcaaaagtgctctgcagcaggcctggcggggggccatggcctctgtagcatgcctgtagctcagtggacgtggagacatggggtgatgcttagtgaagatatccttctccgagaaacacaaggatgaggagactcacgggaaagagaggtgtcaagctggagatgcaggggactagagagcacacaactggggggagagggcagcatgccatagggccgcagtcacttgatggcagcccagcatcgctcttggtaggaggcgacagctagggtttcatgaagggagtcctacagagctgggggagcccctatgggcaggtgtttggaggaggagtggggagagaaacatctggaaaaacaaagtgatgaaagtgggggtaattcttactccctctgcaagcagaaacggggtgagaaacacgtcccgggagttctcaaagtgaagaaattatcccaacatctgctgaaacattcagacagacttcatttccggctgttgtcaggggtgtaggactgctgcgatggggctctgctgcagaggagagctcagcttggaacccagcagaagtggggatttgtaagcaagaagcagggctaggagcagaaagtcaccaaggaacatcgagagtaagagggagcctggctaaactgctgcaccaggactcctccctcagcaggctaactacacattggctgggctaggaggctcactgtcagaggatcaggtcaagcagtggtcaaggtttgggaattggagtgcgttatagccaaaccagcttagcaatgtctacaaccaaaacttcaacagttttatttagttgaaggagctaattgcctcctatgaatttttcctcccctacttcccctgctggccctttctcccctcttcctgtcttctctcctctcctgcctgtcctaggggtctagatatgtagtcaaagctgaccttgaactcactatgtggttcaggttgtctttgaactcaagatctttcttcctcagcacccgtgagtgctgggatcacaggtcctcaccattcataaattttcctttaacagcaagattcatgcgaacacggcacattgcaaacataaagatgaaccagtaactgtcaagggagactggcaactcctgtggaaaatgtggttacatgcaattgcacatatatgtggtgtttgcttggacttgcaaacatatccgtctgcagggggttccatgcctatgtgtgagacttttattctgtagcccaaattgtcctgataagtcgctacctatccctccagacctggaacatcagtgatcccctacctccacctcctagccggggaggattagaggcatgagccaccatgcacaattttaaatgtaactttagacgttcaggatatcaatgggaaaagtcaggaatttcacatggggttgtaaccttgtgtggatcacaggtgccctgggttcctcttaaaagaaggggatgggacagtacagagtgtttcctggcttctctttgctgtggagtgacttttgaagcctggctgcaaggacagtctctttctgaggtaactagaaggaattttaaacagcgaggtacgatggctcagtgagtagaggaaccttctgccagggctagcagccagagctcagcctcttcacatacatggtggttggagagaaccacgtcttgtcctctgacctctacatgtgtgctgtgacttgctctgccacccccactcccccaaaataactgcggggttttgttgtttgtttcttaaagcagatataggcaaggtggcctagcaacaagccggaacacgagtttcatttgtggaacctgtgtaaaggtgaacgagagacctgattgcacagagctgtcctctggtctccacacctgtacgatggcctttgcatggcctccccacactctgctaataaataaaataaatttaacaagagaaagagacaaaatcaccaactaacaataaaacacagtattggtcagtgtttgggggcagtgtagatgtatctgagcaggaagggtgggtggtatgttacaggtgggagcaagaacggagggggctcatttgaaagaaagggaggaaaattgttgtattttaataaatcaaaccagctaatgtaatggctagccgatttttgttgtcgcccacgtggtgtggtttcacaccctcggatggtaagattatccatttattttattcgcaggttgtactcagactatctctacttcgcaagttccaataaatctgcagatgacttccacgagaaagtgacggaggctctgcagctgtttgaaaattgcatgctggattattcactgcgcgcctgcgtctacaacaacaccctgaacaatgccatgcccgtgcgtattcaccagggcagcccatacagagcaggcccactctggtgctattgtgtgcagcggggcattgtgaacagggttttagtgcagagacgggagggaggtggggggatggggacggagtgtttgaatgtgcaaatgacacccagccagctgcctctgagcagtggctaatgtggaagaaaaatgctcccggctgagagaggcacagcagcagctggggcctctgagcctgctgtctgtgtccctccttccttgcctgtcacccagaaactttgcatcctgaatccccctgcctctcctagagacccagggtgcgcttaggagggctgccatttagtaaggctctgcaattagagctggcagacaggaggacacccagtccttaggttgtttcagagaatcttcatagcattggctttcagaattacccaccagtgacggaatgctccagcaggctctccactgcagaatgttctcgctaccccttgttatccttctctaaccttccagtcttatgtaaaatctcttgctggaggtgaatcctcttaagttacctgaggtcacatctcccacacaaggctcccaggcctaagtgtttccctagcagggctcttacatcaggtagcctcctgcccgatgtatgctgtgtcccacatccggcattcacagatgtagatgactagcacgccccacctcagggcagtgaggctcaggggaaagatgtcaggctctctgcttggctactctgtccatcttttcttaagccagggccagcaagcaggagtctgggctgtcttcttgtatgcattgtagtttgcattggcaaggaagactcaacatagataaccacattttcagtcaggcaagctttggaggcagactgcggtgtgggttcattctggctttccctggctttgctcgtgtgtcttagcctctctgaaattcaattgctttattctaggctggtatagggacgggagactgggagtcatttacatgtgccatactgacaaactatggtgctgcgccctggcacacttaggtagagcccaccgaggggtgaaagtgctcaaacctgataggaaaatgatggactctgccagcgttggctgcccagcagcctaaggctgtgccttgatgcaggccccactattgctggagcttgctgacacaggcggggcttccaaggctctgtcaggttgccttttgtagccagctacccagtaatggggggaatccaaggctcaagtctaggctttgaaaccccagctttcttcagggctctggtgtgtctccagaagtttcttctttagggtttccaagcagcaggctctggagggtgggggaaggcaggtgggagaaggcaggtcgtcagttatgagaattcagatgtgctcgaaggcagcctgcctcagggttgcttccactctggtccttttggaatttcttgggtttgatgatgctgtggaactctgcaacgatgcctgcagcgtaggtgggataacaggggcggagggagggaagcaggaacaggccagatgaagagtgaggggtgatgccctcggctaagttaacatgtttccttagaagaggcagcaacagtcactgaagcagctaccacccagttctctcttctcagagatctcctgagaattcagagagggaggggcagatgtaggctcataccagcctaagttggctggatgtcttgggtagagagaggcagggctttggagtcctgacacaggcatagttggatttcatggctgggaaccagggcctctcctgccctgcaaaggatcagcatccgatataaacagctgtggatgtggtggtattttcatcccaccccgaggtacgccctaggaaatgcagagccaagctacatgcatcctggctgcctctaaataggcttcctagagaccggatatcctcagctacatcctcccacagagaagagggggatatcctcagctacatcctcccacagagaagaggggcatgcctggtgtgtttcctctctttgctgtcttcaggccaactgaacatggaaacaccgttgtgactggacaggaagttcatgggttgccgtgtgagtctctctacctctgggtgtgatagatacattcttatttaatctttgtcaagtccattggtgaaagataggaagtatctcacttcagtttgttgctcactgggtactctcctaaactttagctcctcactgacctctgaagttgttcccattttacagatggggacactgaggctcactgaaggtgtactctatttgcagctaacaacaatttggatagcctttgaaatctgtcttccttttcttgctcttaaaaatggttctgagacagcaggaggcatccacttcaaatttcatttatgacaggctttagcatgacaacaaccatagcttagcactgcttgtttaaggagcgctccagggccgtgccatggcagtgacgggtgactctgcggggcatagggggtgggggaggaggggcgggcagttaaggatggtgagcacattgttttgggagatggtttctcccctctggaatggggaaaaagttcccttctagctgctgatgcatcctatctacagcgtggggcatgtggttagtctcctgagtcctggcacggcaggtgtgccgttgcggctagtcatgcatagcctatattaagtaaggccttcatatgactcctcccttccctacagtctttcctgccccattactgtgtcatggcaactctcccctcatttaggtcctcaggtggctgtggcctttgggcaggactcataaagagaggtccctgagagctgatcagaaatgcaaggttcctcttagatgtcatatatggagggttcggctgtggacattcatctaagtcttgggggagagtgcagatgggaagagttgtttgcctaacaggccttctgcgcatgtgcgtgtgctctggtacgggaaccacgtgcttgggaaaacctggctgcctaacagaccttctgcgcatgtgcgtgtgctccggtatgggaaccacgggctccggggccttctccatgcctctttcacgataggcttcccctgccaatccaagagcttcttgtccttcagatttttctttactttgatccactttctcccctccgccccccgccctcacgccatagcaggggtcacagttggtgatgacagttgtctgtccccttatcagtttagaggtatctctaagcagtcagggccatgcctgttaactggcctcacatctccactgcctagtgtggtgcctgatacactgtgggaactcacagtatttgctgaatggatgaagaaatgaatgtctgagtgggggggctgagaaacagaagggagggaggatagatggggggggggtgccgatgaaattgagggaacaagaaagattggggtggttcttgtctggggcagagttgggtctgtgaccagctttagctcaaacttagttgccctcaggtgctttctggacccctcctagttgcctcctgggattcccatacaatggtccccagtggtctttagactcctcaaggcccttaggatcctgtgcctccctaaggcgttctctgggctccccatcaggtgctccctaaccccccccaggcaccttatggaacccacagggtgctcattctttgccagagcttctctgtggtagaacaagtgtcacatccagagggactgacctgacttggctttgtcgtcaggagttaactgctgagtccaggcagacagccctgccctcttggtcttggatttttatcagcgagtcatcaagcatccacaagctcaaaaactccccttgacttgaccttggtacttcccttgaccttggtgctccccttgaccttggtgctccccttggccttggtggtttctgattttacatgaattgggccctaaatagcttctctacaccggttctgttttgattcttgttctattttggttccctccttatggacaggtgtcggggaaatgagattttgtctggttcccagtcacggcggtggtcttgcatgcatagatggtgttcctgaggggcccagagtgctccctggctgagggaaagggttctagagccagtgggttggaagtacactcacttcttagagctagtgcatatgtaggagtcccatgtcctccctccttggaccatatctgcctgtgaggaaggtcctatacagtcaggactctacaggtctttgagggcagtggtggactttcaccaagatggttgtagaagctgttctgtccctggggcagatacagggacaggatgccactcctctaaaacaccagtgtcctgtccctgccagttacttcctttcctgctggaaagttgtcaagttataaaaagtaatttctctggaagagatgaggccaagctgactgtaagcctgggaagagatggcaaacagcctgtgagtccctgccctagcatggtgttcgcacgtctactcgaggttggagtctgcctgtgtatgtgttgctggggctgaggcatgctcggctctttcagtcctgatgagctatttgctctgatcgttctccttcccttgcagcttcctgcacagttagggggaaaaaaacggtgcaagggaaaaggagtagttggagatgaacccagtaagcaccttcgtgcacttggtcagatgtttcctcagtgtgctgtcaacactgagttcagcagttccaccaagagccaccgtgaatgctgacacaaggctttgcccctggtgactcgatggccctgcccccccaggaattgcaaaatcaagtttgtcagggagaactgtgaagagtgtttgcccaaaacagaaaggcctggaggaggagcctagaactgggaggagcccatggaagaagaatgaactggcaggagctaggaggaggagcctagaagtgggcggagctatggaggaaaaatgaactgggaggagctaggaggaggagcctagaagtgggcggagctatggaggaaaaatgaactgggaggagctaggaggaggagcctagaactgggaggtgctatggaggaagaatgaaaggagctgaaagcagcttccaaatgaagagtctcagggcctgagccagggccagcctaggcctgctcacagctttacaaagcatatgaccatgacagagggaggacagagggtagaagtgattgatggaagatccatccaggagcctgagggtgtttagcaggtgctgttgtgagtagacaaagagagggggatgtgagtagggaggtggctggggtgagtcgctctcccttctgatatcagctgtgagttcttgggtaaagtcaccaaccatcttcaagtttggctctagagcagggttcacaggacacacccaaggctactgtgaccctggccacaactcatggcatggcagggattccgagtcacatcagcgagggaaagtgaagggcagagcctctagtgcacttctccccttcagagtcagcacctcctcgccaggatagatgcatgatcacatgaccacaacgaggaaccttgtcaccccaagctgcggtgtccggaattcttactgggcctccatcacatacagagatccatctgaagtcattgtgttagcttgacataaaattctcctgttgaacaatgcaagccagggagggccttcagtggtcacctctgagggcagagggcagataccagacccatctttgagtgggtcaattctttactctaagcttgtagtttggcatgagagaaggaaccaggtaaggatttgagatatgagtctgaggggaggaggaaggctttcctatgcgttgggttttaccctcccccccaacccatgcgtacatttggggtacatcacacacttccatggccatggttgtccccatggattacagtgtctaggttgcctttaggtgtctgtttttgacttttcacagcctgatcgacagcagggagacagccacccacgttatgcaaacaccatgtctgcccttaagagccttcctgtgcttctcacttgtgaggagaggctggagccacctgtgtgaagactaatgcaaccctaagagtggggagtcttcgcgcatgtggcacagagtgccttgtgttaagatttgatgtaggaaggtagttgatggctaaggtgactctgtgttagtttacaaagagttgatccatcgtgctttggaaaagcacctcccaggtctggggaaggttttcccgcagtaacaccctcttcctccttcctaggtgaggctccaggttggcctgtatgctgtgtacctcctggattggctgactgtcttcagtaaggagcagttcctcattctccgtctggaagaccacgcatccaatgtcaagtataccatgcacaaggtcttccagtttctaaacctgggtatgtgtcatgcttcaggtgggggtgggggggtggggctcagcacaaacttcagggatatgggctttcacacacacacacacacacacacacacacacacacgcgcgcacgcgcgcgcgcgcgcgcgatcgagcgagcgagcacacgtgtacatgtgtacaagtaagatgctaacatcggtatcttcctctgatatctcactgaacccagcttgcagtcttggttagactgactagccaggtagtgcgtgggtctgtgtatttcttccttcccagtgtaggggttataggcacatgctgccacacccagctttttaggggcatgctgcagatgtaaactcaggtcctcatgcttgcagaacaagcacttatgagcacttcaccctctgagggagatgctcccctgccccatggcatgtaggctccttagcgggggtggggggtggggggagggctttgggttaaatgtaaaataggaagagatgagctgtgtgaggccaagaaactcctgaagaggtaccagctcagttcctgctcacttagtaactactgattggagcatggtgcatgggacagtgggcaagctctggggaggaggcttgaaggaagcccagtccatctcaggaagtgactgtatcccaaaggggaaggtaggtactgtcccagtgggcctataatgatggaggacccacactgctgaggggccagagaggtatcaatgaaagagaagaggagatgggttgaattctgaagccactcaagtaggtggctaggacatggaatgtggaggcctgactattgcagtggttctcaaccttcccaaagctgtgaccttttaatacagttcctcgtgttgtagtgaccccaaccataatattatttttgttgctacctcattactgcagttttgctactgataggaattgtaatgtaaatacttttggagatagatgcttgcgggggggggggggggcggcggtcacggcccacaggttgagaatggctggggtattgcatcgtggctggtgttgcttgggagtctctggagtcagaggctcatggcctgccttcagcttgaggataccaggtctcaggttcctctaactgaccatgcagaggcacatatggaagtgaggtatgctgcttgggtgtggctaagtcacccaaggacaactgtggaggctctaaatgtcaggccaggccactcttcttcatgggacatttcctatagttctgtttaatgacctggcttaggagttttgttaactgagtatttcttgaaatatatttggccaccaatggaattcagaactcttagccagtgaattagctttctttttcctttcctttcctttcctttcctttcctttcctttcctttcctttcctttccttctttctctctccctccctccctccctcccttccttccttcnnnnnnnnnnnnnnnnnnnnnnnnnnnnnnnnnnnnnnnnnnnnnnnnnnnnnnnnnnnnnnnnnnnnnnnnnnnnnnnnnnnnnnnnnnnnnnnnnnnnnnnnnnnnnnnnnnnnnnnnnnnnnnnnnnnnnnnnnnnnnnnnnnnnnnnnnnnnnnnnnnnnnnnnnnnnnnnnnnnnnnnnnnnnnngcaacttttataaagacaacatttaattggggctggcttacaggttcagaggttcagcccattatcatcaaggtgggagcatggcagcatccaggcagacatggtgcaggaactgagagttctacatcttcatctgaaggtggctagtgaaagactgacttccaggcagctagggtgagggtcttaagcccatacccacagtgacacacctactccaacaaggccacacctccaaattgtgctactctctgagccaaggatatacaaaccatcacagccacctagagatatcttgcattaatgtggttgtcttctgttcctaagagggacaggactgtaaggctagttttctgtcttgtataacccttgacactgggccatgggaatgattttggttgggtcctacgggcttggaggtccagaagagtgaggagccggtggtctagtgaccagaggttgagcgtgtgagcagctggtgacccagacatttggaatggggtggtagagcatcatttgcagcagcagctagcctgccctggggcatcttcccataatacaattgctacaggtacaggggcccccattcctcctgctcttctgacacgtcacagcaagaaagaggagacccaagcccttttgtatcacacaggaacccagaccggaaatgatggtggcagagttccaggaaacagaagtccctgtatgtagttacttaggacaagcgatgggccttgaaggcagcccacagagtagatggaaatgaactctcaggtggcccaaaggtgaaaggacaccatctcactaccagcagggctcccctgatggctggcatgagcctgagctttagaattactttgcagtgtctagtggtttcccccttccttggtttctccaaatgaatccaaccatatcttttttttttatttttaaaaagatttatttgttttattttatgtttatgtttgttctgtttgcatgtatgtgtatatgtgtagatatagatatagatatagatatagatatagatatagatatagatatagatatatatcatgtgtgtacctggagccctcagaggtcagaagagggtatcagatcccctcaaagtggagttatggatgattatgagccccttgtaggtgctaggaatagaagctaggtcctctgcaagaacaagtgctattaaccactaagccacctttcctgttcaaccacatctcataggaaagccttggctgagcatgagggtcacctaggattcatacgaagtccccttcatttcaagtgacacctccaggaccttacaggaccattttccttctcattctagggcctctgagtgagaagcaggaagctctgatgaccaagagccctgcatccaacacacggcgtcctgaggatcgtagtctgggacccatgtggcccatcacccagaagattctgcgtgaattctatgggcctttcaacacaaggctggcacaggtcttggatgacgaagcatttgcctggaagacaacgtgagagctgagtcccttctgcagaagctgggcccactgactctgtcattgccatgactttaaaagtctccaggcggagaactgtcacccacagcgtggagaaagccgctggagccccacccaatcctcttctcatgtccaaggcacctggtgtgggaactattttaaagctttccttgccatgttcagcagctctgctcttgattgcaaggctcgtccacctgaagccttggaaacgacactgggggtaggcttctgtctgttcccagagtgccttggatctcaggagggcagtggatctctggcacccagtgggtaggaagaggaagctacgggaggccatagaccagccttgccttccttcctccaggagagtttgtctgggtgtagggttggacagctctgggatccgattaaggccatgttctggggctgcccctcacgtgttatatcccagcaggccttgcataaatcgacaaccccatgtggacagagaacagagctgcttggagaatggaggctctttcgtttttgttcgtattcccaagtcagcccttcggtgacatcagaaatgagccctgttccctttgctgtgctcagaagaaactcagaagtcagcttttggcagtaggctcgtctctctgacctattctgcccatacactttgtttatgcccagcgtagagaaggagcgttttaaaacaaactgcttctcgcatttgactggccctgcctctcttttctgctcccttggatgttttccttaaggacttcagtttatatttggaaagggaagttttgctgttaatgccagaacagaacacctcaaggcatcgaacagtggaaaaggaaggaagtgaagccctccccatttgtgggggtcactggagagtgtggggatgtttttggttctggctggttacaggctcccccctgtcttcctgttggaggaatctttatccacattctctgtcatgtgcagccaaagttctgtaactcactaagggtgagtctcaagacacccttagaatgtcctcagaaacacatctcacaaactaagctcgggccacatgtggtgtcactaggagatagctttgatttttatgaacctttccaggcctgctagcagcttggttcgcaaaggatatgctgaaagtcttgtcattttaaaaaaaaaaaaagaccccagggaataccagagagaacaacttaaacccacttggcacacaggacaaggtggggatgtcacaaagcttttcattggagcgttgccaagggatgctgcctgtgaagctgtgttctcaggtcaggatcctgttcaccagcgtcagaaagtgtacacaccacatgcccgactgtcacttggacgtgtgagaaaagctgggctttggcagcaggaggctgtgcagttgctcgactgtgtgagttctgctgcggtccacccttgttggagatgggactctcagctcattggaaggttccgggagagctctgggcatcagcatggactgggctcgttctgctactgaaggggctgtgtgtcatgtggcctgtgttccaggacaattctcccttctctcacggtggccacttggctcggcagccagtgggaaaatctagcctgagtacaaggatgctttgggaagaaatgacgagagagagagagagagagagagagagagagagagagagagagagagagcgagagagagcgcaagctcaagcgcaagcgtgtgagaaagagcacgagagagtatttatttggaataccgtgtgtgtgtgtgtgtgtgtgtgtgtgtgtgtgtgtgtgtgtgtgtgtgcgtgcgcgcgcgagtgtgcgcgcgaacactcgtgcttatactgagcagggccctctcagctgtcttgttgatggggcttctcctccattagagacatgatgcctttatgaattaatttctccaacccttcgcctgtcatttccaggacatatcttactgccccacaccaaccacgactctaagagattttttctgacgcactcctatgcatgtgaataacatgtcgcgtgattctgcttcttacagaagtattgccaaaggtattatttccaatattatttggttcattgctgatctttttttatacgtgcagccccttcctttccgccatgcgtggccatccggacccagtcttctctctattgctccctccccgggggtcaccggcactgcctttgcttttgctcggttggagccccctcttgttgagagcacaggcagtgttttgggtgatggctcttgagcctgtcaccccaaaccaaagcgaaacacagacctggtaccgaagacacttcgtattcccaaagccgtgtgccagggtgtatgacaccttccctcccttgtcgtgtaaggtatgatatgcgagtcacatttattctgtacttttactcatatttaaaataattaaagatggacccacacaactggtgcctgccaagagtgagtcctccttcacaagcttgctggccagttgtttccatgctgttctgtgcgcgtgcgtgagtcccggggcgggaaggtcagcacttcccctgccttcctgacagtcccagagcagacacagggccatactcattccctggggaattcctgtggaggcctgctgtggttgggagtcagggtgggaggttccatccagcatcaagtgcccttcacgtggtcgtcagacatagggatctaagactgaggtgacaatgggctttcagaatttgagtttgagatccttggtgcgtcttgagtgtgactcatccctaggcaggcagggtcccgctggcactcaagaaatatgggcaagcttggagaaggagagggtgtaccagtcattgttggtcaccttaacaaagtaactcagggcaccttacacacctttccacaggtttcctaatcagcaccaacagtggtcaaccatgttcagtgttcatgaacagtgttcaactatgggagcccatggggacatttcacattcattcaccacacaacccatgcttactgtcactgctcatgtgtcagtctaaactcagggggccagtgcattgttttctctatggcctctttctgtggcttccctgtgcctgctctgtgacctccccccctcacatgaccatctctctgtgcaggtccctgatacctttccctctttcctttcctctccttctccttctccttcttcttcttcttcttttttttttttttagtttttcgagacagggtttctctgtgtagccctggctgtcctggaactcactctgtagaccaggctggcttcaaactcagaaacccacttgcctctgcctcccgagtgctgggattaaaggcgtgtgccaccacgcccggcttccttttcccctttttataaagatgtcaccattaagggtctcatttaattcataaccttttgaaaaagaattctctttttactcagaggctcaacccatttgggacgtcaacacatcaatttgaggagaggagtagttgcaagagggcttacttcccacttagaagcttggatcatgctgagcacagcgtggtcctttggtcagtcccacctttctcccaagccctgctcctcattgtgatgtgttgagtgtggagctagacttagcacagcctggggctggcttccctcagcaagaatgctgctgtctgagaggatagcgggtggtggatttgagaagccagacaggccagggcatacttctgaaagctagagttccctgtgcctggagctctcccctacccttgctgctaggaaacagcctgggtggtgctgtgcagaatggcatttctctgttggggtggagactgcatcctgaggagagccttgggccctgtgggtgaggctaatctagtggagacttgcaggaaaaatgagctttgaggagtttggttttccctgagctttggaaccagctcccctgaggggcaccagggaaagaacgtggcggggcagggactgtgagcttttagccactgctgcaacaaaatcacttcatctgaaatggctggcgatcccagagagctctgaggagtaacccccttagtccaggcctttggaagaatggcctgcagccttgctaacatctatctctgtgatggcttcaggctggccttgcttctatgaccccagccctgtcccattgatcgctaaggtcttcatggtgacttcaaacacagtgaatttctcatcgtacagtcccagagggcagcagtctcagaccaggcactataggctgaggcagggtgggagctgggctgcatctcctgtgatcccagggcaagctgtgtccaggccttttccagctttgagaggctgccaggtactttggcttgtaggcttctttctagagtgccatatttagtctctgtttccctctgcttccctggtcacgtggcctctgatcacaccctgcctctcatcaggacccttagagttacccgggataatctgtggttactgcctcatctcaagagctcatccacaaagtgtctcttgttgggttaagggaataattcatccataggttctggcatctgtgctctgacatcttcagaggccatcatgcagctgaccacaggagagtggccctgggatctggccaggccagcaagtgagatgtaacaggtgcccagtggcaggtcccttgtagctttaccagtggggaccttaacgtgcctgaggtagcaacagttcagcagaggctctgagctaaggcccttgtattctgtgatggggcgggcgggatggagtctcagctgcaagccctttggtttgtacctttcctcgggaaactcacctcgccgagtgctgtgcaccctagacaggactacatggctgcatgaggagtgtcttttgagggcttacggttgcctttgctttttagtgcttacgaatctactctggcagtttctcagttgcaaccactgggcagcttcagtttctaaagcctggctgttgttgagttcatcgtgttgcagagacgacttcttgtaaaaattacaaaaatagaatccttagttccccagagagcctcaagcttgcaacctccctgcccccagcttttgttaggctgacctccaaccccactggcatccatctatataatggtccaggctgcccttgccttcctgccctctgccctattgcattggccctgggcctggacctggtcctcccagtctggccagcatccttctttgtttttcttccttggctgctgagcatggctcaggcagaaggactggctatgggcagtcatggggtccctggaactgcaggttactgtcccaggaggaatgcatggcctcagtgatgggcgacttccaggtaacatatcaaacaggaatattggctgaagaggagcaacaatgtgtctcagttgccacctgcaagtgggtgtgccctatacagggtcttcagggcagccagaagaggaaaggactctttcctgggcagcacatgatagcaaccctgtggtggggcacagccacggacatgaaatgaaccttctgttccaccagagaaaccccttactggggcagcagtctgtgggagtcagacttcttctgggatttcatggggtgcataaaaagctctttatattttgaaaaacctcaagagagccaggccccggtcatatttaaagcaggtgggtctcagttaaggatgagatatgggtcataagtatacttgtggctcacccaacacaaaataatgggatgaccccgggggctgaactaggtcttgaagaatcccttcctggctaaacatagaaaggctaggtcttgaggatggaggtgaggtggcacctcccctcaccttagctactccttaccgaaaggatgctccagttggcactttcaaatttcactcctccagtatagcacaaaagaagaggtgagcccgggaaggcccgtgtcccggcaggctgactttgtaaccatggagacactacagttctgatatcctcatgagtgggtatcagagttaacaaatacaaattgagtatcagagagactgcacacctgcctgaagtcacaacaaacaggtccgcagaaaggggtcgcacaataccaactcaaaaattttaatttttacttccaggtcaatgcttgtagccctggtgctatattgtgtgaccttggtaccctggtgttccttcttcagtggactacctgcatcctgactgtcataaatccttttctcttcgggcttcatttcaaatgccctcagctgcttctggggtcacccaggctgggggtctggatggtgacaaacttcttcatggaaaccaaagcacattaaagacactcacttcgctcaaaggcttgctgcactgagcctcggcctggcagaggtgccctccgtttcctaccccagagtggatggcccatgggctcagcctcccacacagacaggctactgggggctggcctatggtgaggtgtcccataagacctgagtcacagcctaaagagaagggttccaccctctggccccaggcctgcctgggcggcaccaaggtacacaccctagctagaacttgttcaaagaactaacatttcattttctcagtaaatattttctgaacatctactttgcacaaggcactgggccaggcaatggggcgaggctggcctgtagttcgtgtgcatattcatctgtactttctattgtcaggaagcataggtggttcatctgtgtgtgtgtgtgtgtgtgtgtgtgtgtgtgtgtgtgtgtgtgtgtgtggtttgagagagagcagaacaagcctcagccgcatggagcctggtgctgccgaggacaaagcttggtcctttatctaaagtatcacagaactctggcagccatgaagagatctgatggagacagagaccttccatctgaggcttcctcatcctccttgccctctgtactttgtcacctccctgtgtgctcagtccctagaccaagcctgatggcatggctggaaacagtgatctggttttccccaggtagggtaaagatgatgccccagtatgccctgctgagtctgcactggcactgggctcctgctgaatctccaacctgtcctccatgagagccaactacacatgccctgtccaccctcagcaggcatctggcaccgtcttgctctaaaatcccattggacagcaaatacccaagatcccaaagaataataacatttaatcagcacggggaaggccctaggagccgtggaaaggctgttggggcaggagggctgcagcctggtgtactggggctcactgtcaggaggaagaggaggcacagtcaccattgtggctggtggatgatgagcagggagttagcatttaagaaggaagctgtttgagaggcctgtggggctaagagcctgagctaaaaatggcgtctgtaaaaggcacctgccatctatctgagaggctgtccagctttgttaggctacaggtcacccagccccagagggaagccctatcaagcaagcacgctgtgttcctgtgttctgaaccccagcactggagagcaatccttttctctcagtttgctcctgggctgggctgagagccatttatatgcaagaacatcagggcaaagcccaggaaatccctcatttatggatctttaaggggtctctctacctccctcatcctctagggctggtaggtaccagacaactaaagcaggccctgtaccccgtcaccccatttaaaactactcaatgacacacttacttgacacctacttacctgagaacagtcaaggttcttacacccccctcctctctctcctggaaaccctgggtgtcatggcgtagggtggcccatttccatggtggagctgtgagtgacaaactctttctaagggacctctgaactcgcctcaccaaacccgagtgagggatagaaaacattcgacatgctttctcactacagcttcacagccctgcatggctctcctggacccattactgtccacccctgccctacgccagatgctgcccttctctttggagtcctggcatcctcagctcacgcaggatggagtgggaaggccttctcatctctttacccagttgctccttcagacagacttcagcttctccacctcaccctcagcttctccacctcaccttcatttcagctccagctgctgccctctgcgctccgggcctccttgcctcaccagccttctgggcctgagacctggtggttggcatgcataaatgtgtgaagtgtgtgtgtgtgtatgcatgtatatttatgtgtaagtatgtgtgtgtgcatatgtatttgtgtgtgagtgtgtgcatgtgtgtttgtgtgtatgtttgtatttatgtgttagtgtgtgtgtgcatgtgtgtttgtgtttatgtgtgttttatgtgtgtgcatgcatgtgtgtttgtgtgtgtgtgtgcatgtgtgtttgtgtttatgtatgtctatttcccagccttgatcacttggttatgttaagggcacttatcacataagcgtagcctgaaatctgtcatctgtatcctgcttggtttatggtccttccactcagcagaaccatcaactactttaggcagaaggtctttctgtccataggcatgtcctcggagcctagactcagcaaaccttagagcaaagaaatgcaaaatggtgccctcaagctataaaccaaagaggcatggccttgggattcccctggggtcagggatggccttagaaaccgtcagagagatctttggagagctcagaccactggcaggggctgtagatggccagagctaccagtcagtcctgggaggagatgctaagcagagccctggagactgataagatctggaagcagagggtggggagggcagggagaacagctagggaagggacctggcaggaggtagaagggctcagggtctccaagaatggctggactcaagaacacatggactgacctcctttgtgtgactccatacaggggacctggaggtcagtccatgtggagtgtaggggtgtgtgtggagtgtgggggtatgggtgtggggtgttcttttctttctttcttttttctcacggggcgtgggaactagggagtgtttgaaaagccactgggagcaggcacacttgttattcgtggtgatggtgatgcttcctctcacgtgtgggtgtctttctgaagctgtaggccttgtctccagcaagcagttcaactctgcacttgtatattttgtgcccaaatgagttaggcttgtgtgcacatatgtactcgcctgtcatgtgtgcacatatgtacatgcctgtcatgtgtgcacatatgtactcgcctgtcatgtgtgcacatatgtacatgcctgtcatgtgtgcacatatgtactcgcctgtcatgtgtgcacatatgtactcgcctgtcatgtgtgcacatatgtacatgcctgtcatgtgttcacatatgtacatgcctgtcatgtgtgcacatatgtacacgcctgtggaggcccaaaggttgacttctgcttctttctcaatcactccccacttttctttttcttttcctattttcatgtgtgtgtgtgggggggggcagacagagaaagagagacagaaagggtgacacataaagatctgctgctgattctgtgctcttaagtaatgttagactgtaattaagactgtaaaggctcctgcgactagccagtttggaaaactgctgatttatctaatatttaattaaatagcatttttgttttgttttgtttttcgagacagagtttctctgagtgagtctggaactcactctgcagagcaggctggcctcgaacttggaaatctgcctgcctctgcctcctaagtgctgggattaaaggcatgtgccaccactgcccagcattaaatagcatttttataatgtccaaaacaactggcataaagaggcttgggaacagatataattgaattgtggaggctataaaatcaactggagcatcttgcagaatggcctaaaaccaggagagccaaaacgtcctgagcatcgtggtgggatgtttcctgacatggtaaaaagcctgacactggaaagtccagatgtggagcatctgtggtgacagggcgagaacagtcatgctaccactgactgtcacatggtaggcaccaggtcccttgagagggtacctgtgagtttctcactggactccccctcaacctttggggcaggtcctgtctgtgctctggttccagtttgagggtcatcaagctgaggtcctgagcctaggagaggcagagcggggggccttgcgcttaggtctgttggcctagagacggtcctaactgcagattctcaaatcagagtctgtgaaaagattcctaaagaggcaggtggagccagcgagccagcggaccaaggctgggctgggcggccacgtagttctaaaggtagagccccaggcaggtagtgagggccaagatcagttggggtagcagctttaatgccattcacccacaaaagcccaaggaacaacccatgggatccctcttggctttaacctggttctgtcctcatggaagtgtcacagtggtcttactgccttcctctacatgggctaagacgcactgggttgccacggccagccagttcttaagttggcttacgagccttgtggtcagcagtttgggttgctgtgggttcgaatcatgctggaggaatggggttggggttgatttcttccaggactgccctccagtccacacagaggccattgaacctctcaacagtgaccatagcaactgcttgtttcttcccacctccacatgagataatccagggaactcctgccatgaacagcacagtcagcaaaatggaattctggaaatttcctacatgagcgagccagcagttgttcaaaaggcagcgtacaaaggctcagcttaggtaaatttcctatccccgcatcaccctctgcttcccctcactcatgagcctctctatctctacccacactcttgctccatagagttgcttccttatttaccccaaggccaacttcaagggttatttgcttcttgtacaagagctgggcccatccccagacacacagcagtgcagagcattttgaagaatggatgcctagaaagagtcggacagtctcagtttctccgcttctgattggggtggaatctagaggttttcataggggcctctgttgactttggaaacaacccacttgctccatccactaactcctacaatgcctttgcaaaagtgtgtgcaagagagggtgggaactgggaggagaagtgggcagttctttccctaacaccttgggatagcgctgctagcaaccaggaagatctgaaaggtagccctgcactgctctcttgtggtttaccttggtattgcatcagaaaggcctttactagtctttgagcaagtaaccccaccaagacaggagggccacttttaaatgtagggatcacctttgacctgggccaggattaacctcagtaaaggggtatttgacacatctgaaatcagtcattgggcagtagttctgaagagatccagcagtaaccgtggattcttccacatacgacttgctcccagcagagacttacaggaagtcctgtagagcgtgccaacagcatccccaggaaagtgaggctggaagaaggtgcacagatgttggcctggtctctatccaccactatctatctctgacctacaccacagccgggaatgggctaggctaagacaccacccctgcaagcatctt

SEQ ID NO: 1075 - DNA, 3938 bp, Mus musculus
agaggtttcattcgccatctgcaagtcactcccaaacttttcctcccagcgctcggggagtcaggttgacgcgccctgggtgcggggtgctaggcgcggggctgggcgcgcgctcccgcggagtcggagctgcagaggcttccgagatcgtcttgggcttttcaggtcacctagcattggtatgaatctgctcctcaagaagagaaaatattctgaaggcatgtccgtttacctgtcaacgaggaacccataatgtcttctcatctccagtgtggctccatgctctctcctgatgctactccaactttctttggtgccatgggaaaaacctgaagcacgagcagagtcacctccaaatctgtgctcacttcattttgttgcatggctggtgcggaacagactattggaatttgctcctgtgtgttgcccttcgtacctgaaccaaagactgtgcctcattctctagtgcattgctgcctgctgtcttcctcgttcatttctgttgcttgtgccttcctactgtcttctgtcatcacaggacacccttaaagtttctcactggactcctcgagggctggcccatggctctctaagccagctgtccaaggtctctaccatgaggcattgcattaattgctgcgtccagctgttccccgaagacacacacaaacagcaagttgcctgccaaggaggcccccatcacagtcatcaggcgtgccccacttgcaaaggagaaaacaaaattctgtttcgtgtggacagtaagcagatgaacttgcttgctgttctcgaagtgaggactgagggcaatgaaaactggggtgggtttttgcgcttcaggaaggggaagcgatgtagcctggtctttggattgataataatgaccttggtgatggcttcttacatcctttccggggctcatcaggaacttctgatttcctcccctttccattatgggggctttcccagcaaccccagcgtgatggatggtgagaaccccagtgatgtgaaagagcatcactaccagccttctgtaaataacatctcctatgtaaaggactatccgagcattaaactgattatcgacagcattgctgccaggattgagttcacaaccaggcagctcccggacttacaagatctcaagagacaagagttgcatatgttttctgtaatccccagcaaattcctcccgactagcaagagcccttgttggtatgaggagttctcgggcaggaacaccactgacccctacctgaccaattcctacgtgctctactccaagcggttccgctctacctttgacgctctgcgcaaggttttctggggccacctgtcccacgtgcagggcaagcacttccgcctgcgctgcctgccccacttctacatcattgggcagcccaagtgtggaaccactgacctgtacgaccgcctccggctgcatccagaagtgaaattctcagccatcaaggagccgcactggtggacccggaagcgctttggaattgtccgcctgcgggacggactacgagaccgctaccctgtggaagattacctggacctctttgacttggctgcacaccagatccatcaaggactgcaggctgcctctgcagagcagcccagcaagatgaataagatcattattggtaggttgtactcagactatctctacttcgcaagttccaataaatctgcagatgacttccacgagaaagtgacggaggctctgcagctgtttgaaaattgcatgctggattattcactgcgcgcctgcgtctacaacaacaccctgaacaatgccatgcccgtgaggctccaggttggcctgtatgctgtgtacctcctggattggctgactgtcttcagtaaggagcagttcctcattctccgtctggaagaccacgcatccaatgtcaagtataccatgcacaaggtcttccagtttctaaacctggggcctctgagtgagaagcaggaagctctgatgaccaagagccctgcatccaacacacggcgtcctgaggatcgtagtctgggacccatgtggcccatcacccagaagattctgcgtgaattctatgggcctttcaacacaaggctggcacaggtcttggatgacgaagcatttgcctggaagacaacgtgagagctgagtcccttctgcagaagctgggcccactgactctgtcattgccatgactttaaaagtctccaggcggagaactgtcacccacagcgtggagaaagccgctggagccccacccaatcctcttctcatgtccaaggcacctggtgtgggaactattttaaagctttccttgccatgttcagcagctctgctcttgattgcaaggctcgtccacctgaagccttggaaacgacactgggggtaggcttctgtctgttcccagagtgccttggatctcaggagggcagtggatctctggcacccagtgggtaggaagaggaagctacgggaggccatagaccagccttgccttccttcctccaggagagtttgtctgggtgtagggttggacagctctgggatccgattaaggccatgttctggggctgcccctcacgtgttatatcccagcaggccttgcataaatcgacaaccccatgtggacagagaacagagctgcttggagaatggaggctctttcgtttttgttcgtattcccaagtcagcccttcggtgacatcagaaatgagccctgttccctttgctgtgctcagaagaaactcagaagtcagcttttggcagtaggctcgtctctctgacctattctgcccatacactttgtttatgcccagcgtagagaaggagcgttttaaaacaaactgcttctcgcatttgactggccctgcctctcttttctgctcccttggatgttttccttaaggacttcagtttatatttggaaagggaagttttgctgttaatgccagaacagaacacctcaaggcatcgaacagtggaaaaggaaggaagtgaagccctccccatttgtgggggtcactggagagtgtggggatgtttttggttctggctggttacaggctcccccctgtcttcctgttggaggaatctttatccacattctctgtcatgtgcagccaaagttctgtaactcactaagggtgagtctcaagacacccttagaatgtcctcagaaacacatctcacaaactaagctcgggccacatgtggtgtcactaggagatagctttgatttttatgaacctttccaggcctgctagcagcttggttcgcaaaggatatgctgaaagtcttgtcattttaaaaaaaaaaaaagaccccagggaataccagagagaacaacttaaacccacttggcacacaggacaaggtggggatgtcacaaagcttttcattggagcgttgccaagggatgctgcctgtgaagctgtgttctcaggtcaggatcctgttcaccagcgtcagaaagtgtacacaccacatgcccgactgtcacttggacgtgtgagaaaagctgggctttggcagcaggaggctgtgcagttgctcgactgtgtgagttctgctgcggtccacccttgttggagatgggactctcagctcattggaaggttccgggagagctctgggcatcagcatggactgggctcgttctgctactgaaggggctgtgtgtcatgtggcctgtgttccaggacaattctcccttctctcacggtggccacttggctcggcagccagtgggaaaatctagcctgagtacaaggatgctttgggaagaaatgacgagagagagagagagagagagagagagagagagagagagagagagagagcgagagagagcgcaagctcaagcgcaagcgtgtgagaaagagcacgagagagtatttatttggaataccgtgtgtgtgtgtgtgtgtgtgtg

SEQ ID NO: 1076 - protein, 550 aa, Mus musculus
CIAACCLPRSFLLLVPSYCLLSSQDTLKVSHWTPRGLAHGSLSQLSKVSTMRHCINCCVQLFPEDTHKQQVACQGGPHHSHQACPTCKGENKILFRVDSKQMNLLAVLEVRTEGNENWGGFLRFRKGKRCSLVFGLIIMTLVMASYILSGAHQELLISSPFHYGGFPSNPSVMDGENPSDVKEHHYQPSVNNISYVKDYPSIKLIIDSIAARIEFTTRQLPDLQDLKRQELHMFSVIPSKFLPTSKSPCWYEEFSGRNTTDPYLTNSYVKKRFRSTFDALRKVFWGHLSHVQGKHFRLRCLPHFYIIGQPKCGTTDLYDRLRLHPEVKFSAIKEPHWWTRKRFGIVRLRDGLRDRYPVEDYLDLFDLAAHQIHQGLQAASAEQPSKMNKIIIGRKDYLYFASSNKSADDFHEKVTEALQLFENCMLDYSLRACVYNNTLNNAMPVRLQVGAVYLLDWLTVFSKEQFLILRLEDHNVKYTMHKVFQFLNLGPLSEKQEALMTKSPNTRRPEDRSLGPMWPITQKILREFYGPFNTRLAQVLDDEAFAWKTT

SEQ ID NO: 1077 - DNA, 106373 bp, Homo sapiens
  misc_feature (1)...(106373): n = A,T,C or G
tcagacagcatctggcccatttctgggttggatggtactctgaacagggcactgattcaagggccaatgagtcccatcccaactcctgcaaagctgtgtgcattttgccaactgcatgagcttgtagacggggcagtgtcctctcagtcctactcaaacccttgcaggctcagcttagctggagcacctggaagccattggtgcagagccacagactcagccgctagtgtttatcaccccagaggttgcaaagtgatggcctgtgggactctcctgcaatctgatggcattggttctcactgtgttgtacaattattttttctgatttagttgcccatccaagatttattttttaagttgggctatttcacaataatgttcaaatttcagactcccgtcctccatccagcgggagctgagacatagctgcttccttggatgggctggtgtgctccaccgtgctgaagacccgttccctgttggccacctcaggtcctctcattcatttcccagcccccctcgcctgggtaggtcaggactgcccaaccatgctctacactatctaagagaagccagaacagggcaggtggcaggctgcggtgtctttgcctgagctaacaggcatgccctagtatagtgccgggcacaaggtcactgtgggatgagcattctcttgccctgtcccttgcagtgaggtcagaagaacactcactgcccctagaccctgtgctctttgagggggatcagcttctactcccatccttcccctgtggcttcagcacagccagtagtttgctgtatccttgctcagcccctgtccttggagactggggtgggctggagacctggactcagagaggccaagaggccaggagggctggcttcaccagggaccagaaggcccaaagcccaactctggatggagggaccagccgtgaagctggcctccctcagggtttcagggatgtggcccacaggtgtaggcccctgagctgtgtctgggctcagaacacgacacctcaacctcctcaaatgctcaggacataagaggcttagcagacaacaaagtagtaccctcttagacctggggatggcgggaggggcagggttttcactggatgctggaaccggggtatggagggcccttgggccctttcccagagcaagcttggggcagagggtggggagcatgaacagtgcttccaggtcttgagtcttaagggcagggggattgcaagtgggacccagagaagaaggtccagtcctgaggtgggaggaggggcctcagaggccatctctgagcccaagcttcccttgccggagtagattctccctggctgcttctggtgctctctccatcctctggcccctctcccacctgcattcctcttccccctgcacacatgcagtgtgcccagacagggctcacccagaccacaggggatcctaggcgatgcaaacatctagcactaaagacagcacggccacagactaagaagggcattttgttatcagctttcttaaaatcagaaagataaaaataaaactgatgcatgttcttaaaaactgatccctgtgagaaagcctgctggaccctgggccctaaactctggcactcactcatattcctgttaacaaggaaaaaggactcattagtacctagctggagttgagtaacctttgttttcttttcattgtatttactttgtgattttttttatggtaaatgatggtggtttttcctttgtgatgaagacaaaaattgtcatttaaaatgcatttttaaaacccttttttaatgaatgtttccaaatatagaccagaaatagggatgaatgccagcatgccaccagccagcctcaatgaccttggctggtctcattttttgacacccccagctcatcccacagcccattattgaagcaactcccagccaccatagaactccacctgtgtatatttcagtgtcaactgcttctgtgtgactatatcaaaagaacatggtgagtcagtcattgcacagggagtccctgtgtaaagcaaatccctgagcatggcctggagtgatgtggctgggaacacttgcctgggctggcttctcactgagtgcacaagaacttgcacctgatggggggcagccacctgccccagccctgacgtgcgcatggcacctggttcttccctgtctgtagcctttcagaccgtgggcctcccaagggtgggtgggagtcctggaggctcatgtgtgatgtccctggagcctgctcagaaaatatttcctgaagaagtgggacaagctagctggttggaactcctaacacaaagggtgaggtaggccgaattttaaatgacccctgggatggttaatttttgtgtcaacttggctgggccatggggtgcccagatatctggtcaaacatttttttctgggcctgtctgttggggtatgtattagtccattctcacgctgctaataaagacattaccagagaccgggtaatctaaaaagaaaaaaggtttaatggactcacagttcagcatggctggggaggcctcaggaaacttacaatcatggtggaaggggaagcaaacatgcccttcttcacatggtgacaaaaaggagaaatgctgagtgaaggttgggggaaagccccttataaaaccatcagatttcatgagaactcactcactatcatgagaacagtaccagggtaacggcccctgtgattcaatcacctcccaccaggttcctcccacaacacatggggattatgggaactacaattcaagatgagatttgtgtagggacacagccaaaccacatcagagtgttttgggatgaaattaatatttgcattggtagacggagcaaagcagactgccctccccagggagggcgggtctcctctaattcaataagggccttaatagaacatagggctgagtaagaaagagtcctctctctctctgccccactgtctttcacctgggatgccggccccctcctgccttcagagtcggactcaggcagagacttgtgggccaggactccttagcttttatgatcatgtgagccagtttcttatagtgcacaaatacctacatgtgtgcatttacacatacatccttattggttctgtttctctggagaattgtgaccttttcccccatcacctttacctgtgccctggtgtcatgctcgtgaatatgttgggttacgtaagaaacgagactctacaaatgtaattaaggttactaatcagttgactttagcagagggggttattttcgaattatcctcggtgggcttaatggaatcacatgagcccttaaaagctggcagaaaaggagggcagaggggtctgaagagtgagaaagacttgaaatgctgttgctgtttggaaggtggagagggccacatagaaggaatgggggtggcctctaagcatagagagtgcacctatgttggcacccagcaaggaaatggggaccttagttttatcagcagctaagacttggatccctccccaggaccggtaggtttgagcctagcctgaccgacaccttcccttcattcttgtgagacccagagcagagactccaccagaattctggtctacaggctgtgagattaaaaaaaaaaaggatgttgctttaagtcatgaagttctggtaatttcttactcagcaacagaaggtcgattcagagagggaggaaatccctttctgttcacttctcacaatgagtgataccgattttgggtgacccttgacaggggacagtcccagaagagaatcctcttccacatttcatgtcacggggacggatgtgaggctcagagggggtcacagcaaaggaggagtggagctgaggtcggagctgaggtcagatctggagtctgggtgcttgcagcccatgtcccaagtgctcaggtgagcctagcacgggtctggtgggggtggggcacacccctgaacaggtgctcacaccactccccgcccccagctctcacccacacccacagccatacccacagcaggcttcaattttgtctaagcaactcctaagagccaacccccatctaagagcagggagtccctggaagcagacaccagtgttctgtggtggcattgtcacaggactcatcttttcagaaccactctgtctattgcccctgagccactttgggaagccatgtggatggagctgatgggtgtccaggagccagggagggagacgggcccagggaagaggcaggaccacagctgcacagcctggcaatgtggactcggacctggctaaccttgttggtgcaggggaggcgctaaggatgggcatcaaaggtgtttagtcatggggctgacaggatcagatctgtgttttggaaagacccaggctgtgtaagtagaaagaaccagttagcagatgtcgggagaggaggcagggaaagtagcaggaagaggctattgtgacagcaccgagggatacacgagaccggtccaaaccagcagctctcaaaggtcaatgcgcgctgagggagcttgttaaatccacaggtgcccaggtgccaccccagacactctgattcagatgactggccccaccccactgtaatagaatctctggtactggggcctaggcatctgcattttgaaaactgtccgggtacttccaagatgagccaggcttgggaagaggacggtggctcactgaactggggtaaaggagcagcagtaaagatgtcatggagacttctcccacaggcgccacctgagaaggtgcacagtggacactcacagagcccggggtggtgggggtgaagcaggtctgggttggagctggcagcaaagctgggctagggaggagtgcccgtcgtgatgcactgctcgccgcgtctgcctgtgggtgttcatttctattatcctcctaagcaccgctttgtaacatttcactgcattaaatgctcaaccaggaagatgaaatttatttagaaggctgaggtatttcacatctagggcaggcgacgctgctctaaatttaccaagtcaacagctcatttttgctgttgaatgggttgtagatcttatgacagaagcaagtaagtgagaacgctaccagctgtaaactttatcttattggcgaaatgtctattatgcagctaaaaacatctacttaataggtgctgtccttcaacagttggtagcaacagagtcttacgtggtgataacaatgacattatgtctcttttatcacctgtaggttctttgtattgtcaattactggctgcgtattccttccggcctcagaggctgtaggataaagaggttgcaccattatgatgatgtggtcatccctggaggcactgggggtctgcatctgattttccttcggaggcttctgcctgtattttaggatccccagtcttcatcaggacatagtgaaaatcatatgaagctaacgaagtctgacggatgagtaagtgctaatcaagccaggtgattccaactgggtcattcgtaaacatttacaggctctgagctaggggaggggcatgcagagacatacaggactccgttcctctggaatagagttctgaaatcttaaagctgcagcagcacttttggaacaagcgaaccgcccctcagggggaccctgtaagagcagacggcgctcgtgaatatacaagtctggacattggtttaaaacaagccccattccttttttcactgaaggtttgatgcagagccgaagtctgctgttctaaggaaccactagttgttattgtcctaaatccggtagaggttttggatggggtgtaggaaattttcacaagaacccaaatttcacgtggatttgtgatgggttagcataccaaaatgggcttaaagtgcacttaatggatgcattactgcagaagggagccgcctaaccagagcattgctaaatttatgaaattgaaatgcacttcaggttactgagcagtctaaatttgtcaaagtcacagagtgggaggcaggtcgttactggtggcagaggtggcagaaatctgaagccaaggctgccaaaatgaatttgaagtcctccgcaatgaccccaagggctccctcacacccaggtgcagcccttttcagtggcaggagcaggacctggggctcctgagcctcagtgtttactgagcccctcctagcatgcaggaggcagagagtgacaaggtgtgtccgttctttgccctgccccacagcgcttccctaatgggtctgcccactatgaatttgaattcatgggcactggtgcacactcatggaataggcatggccttttgtctttgagtgtttggtttgtaagcctcagtctcctggcctgaaaaatagggataagtaatactggcctcataggcatgggaaagtgcttagcacagtgcttgtcacaaggtgggactttgaaggtccctttcttcaggagggggctgagtcttagtgaccttagtggttcccacattcagccctgtgagtggcacacagcaggtgttcagagagtgtctgctgaatgaatgaatgaatgagtgagtgagtgaatgtgattttaaggattgtggcaagtccctgacattccaggttgctggtgtccttgtagcatctcttacagaatctttattcaagttatacttattcatggattcaacctcattatgtaattgcatgttaacaaacattcaattatgtgactatcatgggtaaaactacttgcaataataatgattactaataagaactactattttcaactcttactgtgtcccaggaattgtgctgagtatttttaaaatactttgtcttcagtcttgacactagcccactgaggccatgtatcagccagctacagccacaacaatgctgtgtaacaaaacactttgcaacattcagtggcttgcaacaataagcattttccctgccttgctcatgttctgtaggttgcctaaagcagctctgagtcctgctgtatgtggagtgacatggctccagacagcgaatcaagttcaggtttcttccttgtgtgttcattctgaagcctctctggaagaggcagcaacatgttcgtctcatggtggaccaccagagcagaggaaagcaggtctggccctgcaagcacattccaagcctctgatccagttatattccccattatctcattgtctaaagcaagtccaaagtcaaggaatggggaagtacagtccctgcactggaaggctgtgacaaggatgcagacgtgtgataaccaccacgggagagcgaggagttgggatcaacagctcaattgactgctcgtaggtgctaccagaagcctcaaactgaggcatggaaagaagtgacttgcccagggttgctcagctagtgggtggcagaagtagaatttgaacccaggcaatttaaatccacagttgtgggggcctagagtgcacacacgggaagcggggatttattttctgaaagtatctgcatttttttttcttttttctttttttgagagggtgtctcactctgtcacccaggctggggtgcagtggtgtgatctcggctcactgcaacctctgcctcccgggaatctacgggcttgcgccaccacgcctagctaatttttgtatttttagtggagacggggtttcaccatgttggccaggcttgtctcgaactcctgaccttaagtgatccacccgcctcggcctcccaaagtgttgtgattacaggcgtgagctaccgtgcttggccagtatctgcatttttttcagccgtgacttgctaataccatgttggtatcaacctctcttgcagttacacatttatttgtctatccttccacccatccacagggacctggcatttgggtgttctttcaattctctgcagtaagaggctcaagtgcaattcttgggtaattttttgaaattaaggttgaaaggaaaaaaatcaccttctagttaatctcaggcacgtgtataaatacctttggaaagtccctggtggaattcatatcaaagcggcaccgtgatttttacttaaaaacaattttgctccatgtcaaccgtggtttctgacacctgaatttgaaagtgatctgggtgggcccagcgccatctccataacggagttatgtgtttacttggagggaggagaggaaaggcattattccctggcagtatgtgtggccctggaataatgttccacacacccttacagaaggggatttcctccttgctgtttccacagacccttccctgtgtttgtttaaacccgttgcacactggtctgacagctgcctggcccagggccttccttgcagacgcatgtacaaccaaccctctttaacagcaacctgctctgtgtcccctgatgcaattactcgagtatataaacctcactgaaaggcaggcttttcttgggagctaataaataagccccaaagccacaacgtgtgtgagaccttgaaaaatggcatcatcatctattgggaattgtgaaccctgcaaaaagcagctcgttgtattttcagaaataggtttttgtttaaaaaaaaaataaagaacaaaaatcactaagtggagtctatatggaaaaagcaatctagtctgagattctaaggcaagtctctttgctgcattcatctttcttcgcagattttatgtaagaggcattatttgcaggaaaacaagacaggattttaaagaactcccctctcatcccggtttcccatctgcagttataatcctctgatggtgacctctgcattagttgccatgggtgctgagcagaagtttatgacctcagggtggactgtagcttcaggggggcgagatgaagcctccggcaataaagagataatggggagaagccactgtcaggaatgacccttcggtggcatgtagtctacagttaacggagcactttcatttccacttctggttgcttcgaggaagagggtgctggactctggccacggggacacaggccggcaagagactgcagattctttttgtcccttggacctcagtttcctgagaggctgggcttggtgctccaagcgccctctgagcgaatctgccagaatttcatgtgtcttttctttaactgatggcatcttcagcccagagtcagtggagtcggccactggtgccgctttcttgccctcgggctgtccaggtggttccctggggcagccgactccaggccactgcggcaggccgtggcgatcggggtcctgcagagctttacctcccccgcggaagcaaaacacgccgggccaaagagccgggccagccttcccgggatgcaaaaatacaacagagggcgccgaactcaccagcgctgtggccttgaatattaatgtacgggctggctccagaccgccaagttccttaaagatgtctctggcggccgggcgcggtggcttacgcctgtaatcccagcactttgggttgggggggcggacggatcatctgaggtcgggagttcgagaccagcctgaccaacatggagaaaccccgtctgtactaaaaatataaaattagcctattttgcgtggtggcgcatgcctgtaatcccggctactcgggaggctgaggcaggagactctcttgaacccgggaggctgaggcaggagactctcttgaacccgggaggcggaagttgcagtgagccgagatcgcgccattgcattccagcctgggcaacaagagcgaaactctgtctttaaaaaaaagaagtatctggcaaggtgtcactgccagatttcaggggtttcgatgtgcttttatttggaatcaccgcaacacacaagcagtgttgactcggagggggagggggcaggggccaaacccaccgctcggcgcacacgccttgatctcacattccagactggagctgatgtgtgtcagcgcgacatggggcggggggagggttctcctcggatgtttcattcgccgtctgcacgtcactcccaaacttttcctcccagcgctcggggagtcaggttgacgcgccctggatgcggggctagaggctcggggctgggcgcgctcccgcggagccggagccgcagaggctcccgggctggactcaggcttctcaggtacaagttaggtgccagacgccgaggtggggtcggcgaggagnnnnnnnnnnnnnnnnnnnnnnnnnnnnnnnnnnnnnnnnnnnnnnnnnnnnnnnnnnnnnnnnnnnnnnnnnnnnnnnnnnnnnnnnnnnnnnnnnnnnnnnnnnnnnnnnnnnnnnnnnnnnnnnnnnnnnnnnnnnnnnnnnnnnnnnnnnnnnnnnnncgagctcgacgagccgaggcaggtttgggccccgggctccttggcccggcctccccgaggcttcagcgatccccagcgggaggagtcccttcgccattggtcctggccgcgctccgggcgccctgcgcgcttgaggaccccgcgggaagggttacccagcggcgacacacgccccctccctcgcagagaggacgcggccggagcgaggggacaggggaccgagcagtggcgtggtggcgccgtggatagccggaggccggcggggggcgcaagccgcgtggaacgcaccggcgggctgtccgggagaaggagcccagtagtcggaatcggggcgcccctgcaccgcccagctctgggagccgcaggcggggaaccgaccgacggacagaccagtgctttcacggtgtgagcgcgcgtcgtttggcggtaggggacggggattccccccagccttgcgctccgcccccacacccctatcgcactttggggaagtttccaggcgcggcccggggcaggtaagtgggcatccgccactctctccccggttgcgagctcggatgcgcttccagaaccctggctctagccttgcggcggttccgggcggggaggccagagctctcccgcgcctaagcccgtgggacccggttcagggaagggggatggcgggggcgggcctgggaagagataggggagcggctgagccccgagnnnnnnnnnnnnnnnnnnnnnnnnnnnnnnnnnnnnnnnnnnnnnnnnnnnnnnnnnnnnnnnnnnnnnnnnnnnnnnnnnnnnnnnnnnnnnnnnnnnnnnnnnnnnnnnnnnnnnnnnnnnnnnnnnnnnnnnnnnnnnnnnnnnnnnnnnnnnnnnccctcctccttcctcctccccgccccgcccccactgctgtcccctccctgcgccccgccgcgtctcgggaggcggcgtgactcgggagttgccggcgcttcccggcggtggcggcgtctctggccggccttggtgcggcgagccgagcgaggcagctctgagccgcgcggtgaggccagaggcggggagccggggctgcggggcggcgaagctggggagccggatggcagcggccggggcgcggaggcgacgctggcggtggagatgtaatgcgagtctgttgggttgtgtgtgccgggagataggacgcggtggctgtgggtggctgggtggcgggctgtggcgcaattggccccctgggatggcaggatagaggcgccggggcgaagggaaccttgcctttgggaaaatgaatgaagagccgtggaagcaccttcccaactcctccaggcaaccgatgggccggcgtgcgcgcgagtgtgtgcgtgttgaggcttcggagccgcccgggtcctgggcacagctgcttgacctccccgtcgctgtccgggtgcccacgttcccgcccgccctgcgcccggggccggccggcgcggctgggacggcgggtatagaggaggaaggctggggctgggttgccggctgctggcggctggaggtccgcgcccagtgtagggaagtcttcgaaggaggctgccaggctggaggctgggaccagctcctgggggcgggggcccttcttcgtctgcctgcgtgcgcggagccgctgtgacagctgggcgccttcgccttgttcacgttggttaagttaattgtaccgagttctcgggaatgaagtgtggctccgggatgccccgcagagggatgtgacaagccggtcagtgaggctgagcaaaggggctaaccttgcctctgggcgccctagcagtgcccccagcccctctttatcagctgcaattcctgagtgttgtgggatgcctcggtgggttagggtagccacccagcgttggggcagaaaggcctcggagggcatctgcacccccgaggggccctgaagtaaactgaggcctagagatttgcccagcgtttctcctggaccctccttggaccttcctggaccattatccatcccccgctttcctgcttctcctcccaggaccggcaaccttgcaaaatcaggaaccctcccttccagaacatggcacttactaattttacaaactgaatgttgaactaggatctcttgattgatacataaagacatacatagatcatatatgattttattcaaagtagtataggaataaaaatgccttctaagtaggtaggtttttgcaaacaagtttttcttccccaagttcctgagaaactgtcagaagattttctttcttgccacctcctagatgggcacacagagctggtgaggtaaagtggcttgttatggccttcctgtgggcacataggtgagctggaggtggagctgcaggtctgggcttccctccaaagtccagctccggaggagagccagctcaggagccctctgcagaagtccaaccctgtctttgcggctctctcctctgggctttggatgattgcagtgagctggcttgtaggtgaagcatgcaggggtaattcatccaggatattgtccaggggggtggcaggcaggtcggcccacagtggtcacatgtgtgccttgcttttcctggatgatcaaagctcgccatgtctgagccactgtcctggccagggacccagcacggtcaccgtggctgctgtgagggctgcagtttccttccacacctttgtcatccctggttgctgctgcccctggccaggaaaagtgagatatcagaaacatttgatttttcacatgcctggaagagagaagattaattcctgcatcaagaagaagtgtttggggaaaggttggtaacgtgggaagcggattctacttatttggcgtcttgagaaacagcagacaagaaattccaagttaactagctgggccccaggagtctgcagtaggggaagctgtagattagtgctggactgtggtagtccaagccatttcgagttcggctggaaggtcccctgctagtggagggggctggggagaagagggagaccccagggctgtcctgaacaggtgagcacatgcccatctacaggggacagactagactcagctccagccagttggggggaaaacagtgtcaacaggtcttgtgaattttcgagaggattctccagcctgggtatttaaatgtgggctcaaattctagaagtatggtagagggttaggggtgagtgcccttccaggaggtctgaagcttgccatctggcccggtgcttatctattgggaagggtgtcactgcatcagagagcagggcacaggagccacacccattgtgggcccagggactaagaactgatggctgcccatcatgcctgcggccaggtccctaggctggaggtgaggcgggcagagctccttcatgtactcgtgtgccatgtgttcattcagcagctgttgaatgaattgccatgatgtagaaagtcatctgcatgaaccttttcatgtaattcctttcaccaaatagatcctacagctgagcctctgggatgatttggcggggctaggacagacagggtcccagccctcatgggatggggacaagcggaattggctatgtagacagacaaatggtccagaagctgccataagagcccagaagggtggtgatgcaaagcaaggcttgggagcaggggtcagggagtggagggtggactcgggggagtgtgaggagtctccttttcaggtgtggacattgaatttcagagcagtgggtgggaggcacccaccccctgaacaggggatgctcaggtatgatattaagttgggagtgacttgcccaaggtcacatagccagtaagtggaaagtcagggggtctctgatctccagctcttggccagctccttcatctccactgtactgggctgaggcctcttagaaactcccagaggtgtggacactccctgtaattggcagctgtcatttttcccatctacacgttcaggccctgtccccgttcctagggcctcagcaggcccaggattgcagagatgccatttggagcatatttgtatgaaagaagagtcgtctaaattctaaaagcagagactgtttttaaaagtggtagctgacttgggagtgtcattgatctgagcaatcagccagcggacttctctttagcagcttgtgatttggaagtgactcagtcactggtgagaatcacgcagcctccctccccttctggtctgtaaaggggatgctcaggtatgagattaagttacttcaaagggtcactctgttccagtgctgtgaatgaggagatcatgtttgcacttagctggctaagtgttgggaggctgagtgtttccactgctcaaggcatttcttcattggcctgcagtatgagggtctgatttctttactgagatagtttctcctttcaaataaagcactgggacaaaatgatttatgtgtagacctgtgtctccacagcaggagatggaccataaatggaacagttatctaattagtgtgtccagtctaggtgtctagttaggagtgtccaggaagaaggagaaaggttttgtgtccatttgggccaacatagactttttaaattgtaactatgggagttggggaggaagacagttcatcgcaagacctatcacgtgctgcgtccctataggtttgaagctggccctctgctagacaggtcacacaggtatatccctttgtgtcctttaaagggctgggaagctgttggagatgacacacaccaagctctcagccatccggatgtgcaggaggagggattgggaatgacggtagaggcaggagggaaataagggggtgaggggagaagaacaactgtggctccagaaggaggaggcggcgtgaatcagcaagtggttaagttgtggggaggtggcaagtgggaagcagtttctcatcttcgctgatttccaaagggatggagaggaaaggaggctgtctgcagcaggacctgcagcgtttctgccctgcaaccctgggccaggtgcatgggggcagagagccagcgctcagcacagagcacagcactcagatcagtgggcgaggcggagctcgtgcaagtcagagttatgtaacgccgttgacaggcaccttatggggcttggcaaagtgcagcaggagcccggggtagcgactttgagattggagtgttccgggaagacttcgccccctggcttgagggcgggtgtcttttcagagttaatacctgccagtgcttggcacagtgcctggcatccagtaagtgctcagtaaacactggctcgggtgatattcttcagccccggagctcctaaccgtgcatgtctccatatttgattccagtatattctacctcaaaggatataggcaggagcccctgcaagccttggctccagctaggtttccttagggtggtggcttcactctctggactctgtctcctcatctgtgcgaggagaacactggtaaacagctacccttcaagacccttcagctgaccttgcagccaggctgtggagcagctccgctgtgcccatatttgatgcaattaaccagagagaggagaccgcgtggctctaggtggaactgtgctggtgtagctcgcttgtgaatgttacatctcaccccactctcagcttaaaagagcccagagggggcctggagggcgggggggtgggggctcctggcttcggcaggctctccctgatgcctattttacatttctagaacttatcgtggcccaggcctcttagatctctgaagaaagtaaggctggcagatcctcaaaagcagagggtatcattataatggaaacttggacactttccagaattgcatttgtggtaaaaatattgaaacagacagtccaggcacccaggtgcctggaaaataccccaacatgggcaaataattagatacaggccaggcacaattatgtttttctgacaataggctggaactcggtggcttagcattttctcttgaaacagaatacgcccctgccggacccttttgctccctgtggtcaaaaagatagtggtgtggccagcaagggggagggcatacaaggagaagtggcgatcccatccctcccagggtggccctggatctatctcagggaggttctgtcctgcttttgcttttctgtgtccctgtaggtagctgtcccgagggactgggcccatggcacctttgctaggaggccagagcctgcatttcagagtctaagaggtcgagagaggtgtaagatgtattatcttacccttccacgaaagtggtctgggcagctgtgttcccttttgtaacccctggcagctcactcatgctgatggcggtaagttcacctgtaccttcacgtttcttgtcagccaaatatttggcgcccgtgacacggaagctcttttagcccaggtgttagatcgcataggcactgggtggggcagggcaggtagtgggttgagcctgggatccacgctgactcaggttcaagttcatgcagtgctgcttcgtcccattactgtggctctgaacaagtggcttagcttgcatctcggtttccccatctgtaaaatggggttaatgatctctacctggttgggtggcttgagtatttgaaatagtacaattcagggttcaggggagctccccacatggaatnnnnnnnnnnnnnnnnnnnnnnnnnnnnnnnnnnnnnnnnnnnnnnnnnnnnnnnnnnnnnnnnnnnnnnnnnnnnnnnnnnnnnnnnnnnnnnnnnnnnnnnnnnnnnnnnnnnnnnnnnnnnnnnnnnnnnnnnnnnnnnnnnnnnnnnnnnnnnnnnnnnnnnnnnnnnnnnnnnnnnnnnnnnnnnnnnnnnnnnnnnnnnnnnnnnnnnnnnnnnnnnnnnnnnnnnnnnnnnnnnnnnnnnnnnnnnnnnnnnnnnnnnnnnnnnnnnnnnnnnnnnnnnnnnnnnnnnnnnnnnnnnnnnnnnnnnnnnnnnnnnnnnnnnnnnnnnnnnnnnnnnnnnnnnnnnnnnnnnnnnnnnnnnnnnnnnnnnnnnnnnnnnnnnnnnnnnnnnnnnnnnnnnnnnnnnnnnnnnnnnnnnnnnnnnnnnnnnnnnnnnnnnnnnnnnnnnnnnnnnnnnnnnnnnnnnnnnnnnnnnnnnnnnnnnnnnnnnnnnnnnnnnnnnnnnnnnnnnnnnnnnnnnnnnnnnnnnnnnnnnnnnnnnnnnnnnnnnnnnnnnnnnnnnnnnnnnnccttccatattcctgggatggtgtagaaaccaccacgtatagacaacaggaaagttacacaggggagcttcctcctcatggaaggaaacatctggggtggcggagaacagtcgccctgtggcaaggaatatgatgtgctgggctccgtgcccggcccacggttggagggtggtcaatggcatctgttaggtacgtacttggtagaagtggccacagtgtgtcaaatcggtgttgttgtctgctgtaggaaataatctggctttaaattcaagaacatctctttcctacttgttggcagagcatgattgaggtaatggtgatccatggatctcaaggtcacattctaagttgaacgcaattcacagggagctgaggtagtggttgactcctagcctgggcctggagaagcttctctgcctcctctctcttggtcccagccccccacagggcctgtgcttttaccagacctggttctgtgtttgcaacgagacgcctggccagccgggcctggacctggctacacttgggtcccccggccactggagagggggagcccccacatttgcctacttcatcatcgagccccccacccccactgccttcaggaagcgtttgccagtcattcttgctatctgctccccgtacctcccttccccagccaggtgtggatccttcctcctctgagcttctgcagttttcctctgttgtatttctcaaccttgaccctgtcccacactgtgctgggctccagtttcctgggtgcagtctgctctcccagcctgatgaggctctcttcaggaggagggtgtctggggctcacggtacatccatgtagctggactctcacttagtggccagtgactgccatgtgctgcattaacgcgtcaattaaaaatgattcttccaaaggctaggttctcctggaggttttatgtgaacactgagtttgatagtgtggcacaggagagctcacacttgtcactcaatttcccaaggagtcgagagtctaatggaataaccttggatttcctggcattaggttttggggctattaaaacatagtgaccacagttttttgtgtcttgagagccttaggggaaaatgttatggaaatttggttgttgtttcaggaatataagcggagccgtctactcaggcgagaaatgtggaggctgctggtgtttcttatagctggtataaatagcttggcttcaagttccatgctcctttgtttggaatgtaaatatttgcattaaaaatataaagtatgtcctggcatgtatttttagggactataatttccaaaccccaaatcagactatgggtctactgaggattaattttctctgctttgtgaacctgtgtatgtaaagagtcttccaaatgtacacaccaaaccctgtttgctttgtgcatggaaggaaccgccaggattacaagaaagcagggttgccccggggagtgtgggccgagggcttgtgtttctctccacacacttctgatggttctgcctggtagctgcagcggctcagggcggtggggtggaggagttttggccgagatcttgtgggtatcatcaggggcctggcttctctgttgttggtttcctggacatccaggtggggatttggctgcagctggctgacctctgtgtcacgtaaccagacgcttgactttggagttgcagttgctctaggaagatgttcgggagttttagtgccctttctgtggtctggtggagggagcaggaagttctcatgtccggttcagaggtgaactgtgaaggcctctgtgtggtgtcttcctccactggattcctgggggctgtttagctttaatttttctatgaaggacaacctggatgattggttaatcccttactgtgggtgggatgtcatctctggtctggcctcggcctgttctcggtagtggggggcttgatggggcagcaggagctgggcatgccatttgcccctggtatgggggagcttgttcctaaggctctctgggcagccttcaatggtcaccttctggcccaaaggctctaacggagaaggttgggccatggaggtcagctggcctgcaggggaggaccgaatgcaggtgggcccccaactggcaacctccctcttgtctcatcacaggatgaagggcagatgagaagacagccaggagggtcctgggccctcagctgtgactccccgagaggcaggtaccaagggcttcctttgtccttgcttcccagccagcgcgtggcccctgcccttgggagggtcagctcctcctccgtcccactgaacactgatgcctcaggactggactccttggggcagcagagacccttccgtctttccttccctagctctgccttgcaaaggtgcagcctcctgagcctcagagtgtctgacatctctctgcctgggcaccctctctgaaacattgtgtgggcttagaaaccgtgagccttgggaaggaccatcttcctctgagctctgggtgtgttgaactgcggaggcttaccacttcctcgcctgtggtcatctccagcctgacccatggtggcgtgatcctctctcatcatccgtcacagtttttaataaagaaaatatgttccagaaaggccgagtccccatgccgcatcaggtcagtgatccaagtgcattatagtgaaagtcagaggaaatagctgcttttaggacacgctgaacttgcctaagaaagttattagtgggaataaatgagggggaagaaagcatgctccgactaacgagaacagtatcagcctgacattttgtgtcgtcctaactttgaaaagctatttatacccacttgctagcagtttctatgagaaattagatatgaggagatgtacagaagagaagagtgggagctgggtgactgtgagctcctcctcagaaacatcttccaggcaaaaaaaagaaaaagaaaaaatcatttgctcacctatcgacaatagaaaatccagggatcttttgcattgtataaaatttggctcagagaagaaaaatgatgtattgaaaagaagatgaagcttcagttgccatttgagtggtggaaaataaatttgctttcggcccttaaaatggaaataagtcgatagaaaaatgcaggcctgcccccttttgagtcagcagtttttttggttgatgaaagggtgagaagacgtgctcactggaagtcacccgctggatcacttaggaagccgcagaagtgccgaaggacatgcatgtgtatctttcaaagttctcaactgatttattaaaaaaaatcataaagcagacttttgaaaaacctgttcaatctattcttctttaacagctttactgaaatgtaatgcacacaccataaaattcacccaaagtatacaattccatgttttttagtatattgacagatacgtgcaaccactaccacagctaattttagaactttttttaatctcaaaaagacatcttgtacaccttagctatcacccctttatctccccattcccctacatgtacccttcagccttgagcaaccacaaatctacttcttgtctctgtccagcccaattcctctattgtggactttcgtatgagcagaatcacatagaatgaggtcttttgtgactggcttcttttactctgtgtaactgtcatggttcatccatgctgtggcatgcgtcagcacttccttccttttcatggctgaataatattccatcgcagggatagaccacagtttcatggatccatttgtccattgatagacatttgggtggtctccacctttggctcttatgaatgaggcggccataaacgtttgtgtacaagcttctttgggtgtggacatgtgtttccgtttctagggttatgttttatgagacgttttcactttcttctaataataagattcattttttaaacaacaccctttccctggccctagaaaaggctttgttcttagatgggatcccgatccccctgtcagtgatcctggctgagatactgaattgtctgaattttagagctggaaaggccttcgggcgaacgtggttcagcccctttttatagatggggaagctgagggccagagaggccacacataaagagacaggattgaataccggtttttggagttacaatccaattactccaaaagttctccctaaactcttactaaaaccccaggttgccttcttgactggcctggggcagcagattaaggtgggttgggtgaacagatggtggttagcttgccctcttttatgtgattatgggtcaaggttttcagtcatccaatgtactcttgcctgttttcctttcacccatctgtctgtccatccaatgtccatctgatgtccgaggcccagaacatctccccatccaccagcggccgaataagaacagcaccttgtggcgccagcatctttctagttctttctcccctgcggtgatgggcggcccggctgcttatccggggaataattaaattaggaaccaattcagagaatgaaattttatctgatttggccaagcccgtaataagcaaggggctgtaattgtgactccaggatacattaggaagttgttttttcaagggtacgctgggtgaaagcattgaaagaaatatgtggagaccaggccgggagatctccctgggccaggtttcttgcatggcctgggggtgtggtcccacagggcggctgtgtcctcaggctggtccttccagcgtttatgtttccaggcaccatttagctctgatgaggtagataaaagtgttttgtggctggagtgttctctgtgcttaggaaagttctgttaaaatccttatggatatctatctcattgttatcactgatattctaaagcacctttacaactgtaataagaagtaaacttggcagaaactctgtggctataaatcaggggtgccgctttgcaacccccacggagcttattgaaagaaatgcacatactttggtcctacatcagctgttacatcaagtctccggggatggatgctgggcatttgtgtgtgtgtgcacgcgtgtgtgtgtgcatgcgtgcatgtgtgtgcatgcatggacctggattcgttaagctctttagctaagaaacactgagggaacttagcagtgattgtaatcattcttctaatgagaatttccagttctcctatggcaaagataagggacagataattagcacagtggtctcaggaatgagcctcatttgtcctcaatctgtgatgagactttgtgactgtctttgagtttcatgttcagattccctgattgtaactaacacacattgttcatcacttggtagcagtggtggaattttagatctgtttttctcttggggaaggaccccattctcatccccacagtggcccaggctggaggcccaggagtctcctttgacagatagctggtcagtgcagaattgcttcctttgtgtctctgccactggaaggttatctgttccttcagaacaggaaatgtgtcttattcaacgtggcatccccagggcctagtccatgggaaagaatgattgggccgatggacagacagatgggtgaaaggaaaacaggcaagagtatagtgaataattgaaaactttgacccatagtgcagggatggtgagtgtctttcagatcgtctgtttatagctggggaaacggaggcctgcagaagtcagtgacttgccctaatccttcagctttgatcaagaagaacattggggagcctggcccttcaatgtcttcaactcttctgactcaggctctgcacatcctcttgagagtcaccctccagtgaaaagaactctttattgaggccctgctgtgtaccccatgctgttctaggagctggggatctagcagtgagttagacacacagggtcccagtgctcacagagggcatatcctcatggagagagacaggcagcagacaaggtcgcaaatatcagagaatagacaggcataagggccatgtgctggagtgaccagctggtgtgcgggaaaggcctttccacaaaggtgacatctccgttgattcttgaatgttcagagggtgctgctgtctgatgcttggaaggagggaacagtcagtgccaggaccccaaggggagaacctgttgatgggatgggattcatttatgctcgggagaaagagacttggtttattggacgcctgggttgattttcttctcttctgcatcctctgcactgacatttgcagctctgccttctccccgtcccgtctctgggtgaagaacacctgtccgatgctcgctggcctgcagctgctgcagagtttcagaaaacagggctagcaaaaaacaaagcaaaaccccaacatccctgtcctctcactaagggcttggctggggaggcagagttatttttatgtaagcacatgcttgaggggggacgtcttggggtgggcagctgaaaccacactcataaaaacaagaccgaaataggactgtgaattcccaaaggtgaacacaggccgttaacttgaatttggtgacagttccatgcagcctaggtcctggagcgggaaccctttggagggggatgaggcatggaaaactgtttgctgatttggcctcttctttaagcattgctttccggccctggctgtgacagagacctggcccttgctcaggatttgagccccctcaaggggaagttcttcctccctcctggtgctgcctccagctgtttctgtctcctcgtcagtaagaacctctgtttcttgagggccctcctgttggttgtcctcttgttgcagccacctccctacctgcgagggagtgggccccaggctgcctctccatcccaggtcctgctgttaacctgggtaaccgtggtctccatggggcagcactctggcctcccaggtcctgcatcaggacaccctgaaccttgtctactcctggactgctccataccacatggagtccgtccttgttaatgacgtgttaatgccaggctttcttgtggaaaccacacccaagacaccagctggtcaacctgacacacagtagggcctcaacggattgtgtcatcagttattttcataaactttaaatctctttctggtctccccagacatccttaagagtgatcctttgtcacattgcaaagttttcccaataaatattggtcagtagttgtgacagtaatatacatctccattttatgttgttgactaatttttaaatggtggacaaaacataaatttttctacattttaataaatggaaagataaaagaaatttttttttctgagtagtttggtttagaatcattccagttgttcattcagcatctcttcccaagtcacatgagtcctacaccaggcagctgtggctgtattgacatgctgaatgcttgctcagagtccccataatctcttggcactcctatatgctgcctcatacttttattttaattttttattttgaaataatttcagactcacaagaagatgcaaaaatagtagactccctgtgtacccttcactcagcttcccacagggagaacatcttatgcaaccctcagacatgatcaaagccaggaaactgacactggtacaatagcattaactgagctgcagaccttatttttcttattaaacctagggatctacagcattttagaagcattttagaatttcataagctttagcattgttgtttgtcttttagaggatgtttcaatcccttccaattgacaatcagttaaaattcgtttccgtaagttcaacaaatactggaggatgaatttcacaggttccacgggtccacatggcgctctatgggtgcatcgtctctgatgggtgcacagaggtgaccttctacctcagatctgagagattctgagacataaagaaccttagacagtagtttggtttataggacagaccaggggagctggagttctgataatggaaaccaggctgcattgagtatttagtatgctttaggttttatctactttatttcatttcatacgctcagcaacctttgaggtagatacagttaacatccccattttacagatgtaagaactgagttcagaggagttcaccctgcccacattcctgcagctggatggtagagttgggcgtggaatataggcagtgtgaagtcagagactgcttgttcttaaccttgccgggctccctccttggctcaggcctgcacagtgactgctgtgtgccctggggctgtcctgacttctctgagtctctgtttctttacctgcaatgcaagaggcttgtgtgagatctgccgtgtcccttccatttctgagtgcaggtggttttattggtgaaaacaattctacccgtagagctagaaacacccaagcaacatccaaatgaaatttgtaccttgccccttgtaggtgcttttaaggttggtagaatttctgcagcctagtttggtttgatgggagcctcaattccaattgaattatgctctggtgtattttaattaaaccatctacaagctgattttataaagaggcagaatccccatgtagtgagctgtgcctgcctccctctgtgctcaactctggagccgagtgaggctcgtaataaccagaggactgtgcgagctgctcaggctcggcctcatgggcagcattaattgtgagatgccaccggaacgagatgcgagggcattatcagcatatacttaattgattttgcattctccacaaaggaaggttaaaattaagcttgtttgtaaatggtgtttaaactgcacaggcttggggatgagttgcagaaactaacagagcagggcactggttggagggcctaattttctctttaggtggtggacagagcacatcactcaactaaggtaaagattttcccatttaaaggggctgaaagagtgtaagcctcggctcgtaaatttgacagacaaggcctccgcttgagtgcctcagggatggtctggactctggggatgaatgtgtaatcacattagcgtgatgagttaaagggccccatatttttaaatcctcaggcagagctgcattagagaagatgctgttcgagatcagacttatgataaacaggctcatggaaacagcctttgctatcctcattcctggtatagaatgtaagattctgattgtcattctgacatgccccaggaaaggtctctgctcaaacccaagatgagctttaaacctgaggtggaatgccgttctctaagtatctgttctttggctctaacatataccaggaatgagaacagcactctgggtgtgttctcactctcctttaatcctgataagaaaacattttaagtatctccagatccatctatataatttgcaagacgcagtgcaacatgaaatgcatattaaaaattattaagaattggccgggcgcggtggctcacgcctgtaatcccaacactttgggaggctgaggcaggtggatcacgaggtcaggagattgagaccatcctggctaacacggtgaaaccctgtctctactaaaaatacaaaaaagtagccgggcgtggtggcaggcgcctgtagtcccagctcctcgggaggctgaggcaggagaatggtgtgaacccggaaggcggagcttgcagtgagccgagatcgcaccactgcactccagcctgggtgacagagcgagactccgtctcaaaaaaaaaaaaaaaaattaagaatttaaaaatagggaaagcagaacaatacattctgtatagggtgtttctgagcaaagggccctgtgtgattgaccatgggtccacgcccttggagttggctctgggatcttgtaggatgctgatcctagaccaatgtgatttatagcaacttgtgtgaattgtgaactccccgggggcacgggctgcagctgaatcaccttggtgtgctgggaggggtctggctggaggcctgacctaagcacacgcttaggaaatgcccgttgagctgaatcaactaactcatggagccatcagcctggtctgctggggaaatttcatgtgactttctcagtctccacgcatcgggaatctgggacagtctaccgctaggctcttcagaacagacagggacaaggaccaacattctctaatgaaactcactgacttgacagctcagctttgagaagagaaaacctgaatacaaaacccatctacattatgtgtgtgtataagcctcaagtcctggtgatttttcactgtaaaatggaaaagattgacacacagtggctctccagtacctctgtgtggttaatgtgtgtgtctgtcgtgactctgtggctcagtcccaagagaggggcagcccatctcccctggcttttcatccctgatgtcctccctgtgagctctgctcctcccagtggagtaaaatgctcctggagacagtctaggattttaggggccactgtaggtcatccttgtcattctggatcccggagaatgccaccttgcaaagttgaggggggcatagtgcatcttggtaaggaaataaaatcccgcccaggaagcatctctccctggagcaagaggcttggaagggcccgggactcctttgtgctgactctttgttccttccctgcaggctggcccagactcagagttgccctttcccctttgccagtggagagggagagaggagcatccagggccagctgccaaagacaggggaggttctagccaaggaaagcccggacttttcaggttttaaattggaagagggcttcttgaatgagcattaaagttacttttttattggaagggagtgtagggggtggatgctgtgctcagcatacatcaggagagagctgcccaagtcagatctcttccgagcagcgtcttgggggagagactgtgcaccaccgctagattttcctccctttgtcctcggtttgtacagaggtcactggagatgtgagctcaaagggagccgggacgctgtgctctcctctcattgtcacaagtcgatgggcctgaataggctgtgacacttgaagaaagaaagaaaccatcctttatacctcctggctggggagagacagcagggcaggaagcctgcagtgctggaggccaaagctactcccatggagcctcagatgtgtggagggaggtctgtgctgttcctgggtgtctgggattgtaccctccccaccgtggggatgcacagcctgttcttaacttattcagcaaataacaaacagcacctccatgttcaagcaaaagctggctttatttattttccccattaagctatccacagtcattgttttcactttcaaaagcaaaataataggaaaaaacttcacaatatttgtattacctgatgtaggagtctgagagaacttgaataataagtctggcttagaagtattaggggaaaaatcttgatacacaaaagagaaacagaaacatgaaaagaggaatgtgctgaaacagtcctccctgcaaaacatcattaactccgcgggggctgggagcctgtctgtcttgtccacacactgcaccccactgcctagcacagccgcattcaaaaggaaagtcagccctggctgctgggaggcagtggcgagtgagacatgcccaggtcctgtcctcatggaggttagagtctaggaggtgaatgaggtggaaacacttaggcaaaggatcatttaatttcagttgtgatgagctggggacaggaacgggaagtggtctatgagcaagtttgctgatgccgtgagcccagtctggcagaggcgcggggtgcattggagagctccaggtcataatggaggaagctgcgcggagggagaggaggcagagactgcagacgtggcgaaggtgttgggtgtgcagggggatgttatgtaagtccccagtgaggtgcctggacccagagttctcattttaaggcttagaatgtgctagaatccttgtttctagagactggattgatgatcacaactgggcgatgctcccaactaggcccccgcccctacctgccacctgaattgtgccctttgcagttgggtggcacactgtttagtgtctcctgctcactgcctccagggttccagggacttgctgattttctgtctctactgagagatttgagaaattcttgaagcaacttgccaagtagaaactgtctaatggcatcagtgcaaggattcggtgtctttcccagccggggggcactggccctgcagagatgaagtggaaagatctcgggagggagagcaagctaccttcctgggggtgcagcaggcgtgacttgagnnnnnnnnnnnnnnnnnnnntgcagcaggcgtgacttgagcttgcgctaatcacacccacttctgtcctgagaaagtcttctatggaaagaggctaaaaagactatgtggaaaatatctcttttaaagcccccatttgagacctctcccctgccctgtgtgtgcctagcccgtaggttgctgccaaggtgagcaggcccgggatgtggctggggaagatctacagcctcctggccgagtccacccaggaggagccatttaagaccctggaaacccatcagacctggcaactggaggtcattagccgtctgactgagaggcgggtcgtaaaataagccctaagtggttacgagctctgttaaccattttaaaatgcacaaacagaggagctttggtttggcgcctctgaaaggaaatgggcgtcgtctgatgggagaacattcgccttcatggtcaaggcgcaaggaccagcctgcattggctcattcatgcgcctgtcgaatggttgctgtgccctttgcctcttccttggtttctgatggggcagaaacttaccaccatgtatctagctttctttttttggtgaacttttaaggaattggagtataaccttcatgcattaaagagcatctatcctaagtgtgctgcttgatggattttcacaaacagaactcacctatgcaaccagtacctagatcaggtatacagacagcaccccaggacccctgggctctgttctggtcattaaccacctctcagcacccatgcaagggaaattgctatcctgacttccgcggcctgggtttttggcctgttttgtgctgtctctaactggaatcgtgtgtggttctccgttatatctgggttcttttgctcagtactacatctgtgagattcttccctggtgaagcttgtccattttcgcagctgaattgtatttgtccgttctactgtgggtagacactgtgtgatttccagtttttggccctacaaatagtacaatgaacattctagttgatgtcttttgatcagcatatggatgcctttctgttgggcacgtagctaggattggaattgtggtctttgggagtgagtacgcccaagcttcagtagataatgccagtgttccaaacaattgtactcatttaccgttcccatcagcagcgtatgagtctctggaaagatgaaataagagcctggaaaaaatgtaaggtgagactgactcccttttgtcctctgcccaagttcccaaaaagaagagaccctgggggataacagctggccctttttgcattgaatgggtgcactggaagagataaggcttctgggatgccccagaaagatgcacctgtccctcctggggttctgcccacgtggtcacgtttcactggaagccagtctgtttctgaacttgcggatggggttggttggtctctgagaagagcccagaattcagcattttagtctccatgctttgggtgtctgcatgcaatgaagcaaagcctccaggctcatctttgagatgaaagtggctggcctggtggctggcctggtagctggcctgggttttctcttgggagggcttgagagctgccaccatttaatggctcagtcaagaaaggtttttatttgtagatcagtccagtctcagaaccaaatggttctgcacccaccccctggacttccaacccagtgttctaggtggagaaagagctttccctgtgccaaaagctgttgtttggtgtgatgaggggtccagagcagtgggaagaggcagctgacatttactgagcctcctgcatgctcaggagaactccgaatgcaggtgtgctggtctccccaaccacacaggaagtggaagaagagaggactctgcactgtccctgagcagcagagccccagctggggtgtgtgtcctgccctggctctgtcaaatttgtaactcacaacagtggcagtggctggctaaaggagacttggaaggaaggaaaacctgtgcccgggttattgcccggctgtcttccctaccccaagtagattcagtaaatcgggggcagggcttggaagctgttggtaacaaatgccttaggtgagttttactcaatttggggaagcagtgacttcccagacccttttgatgagaggctgggtaaggagaggaatggaggaaataagaaacagatctcacgctccaggagcgcctggcctgagcagcctcgtgcaggaagctctctgaggagctggacaagctctgtgtctgctgctccacagggtcatgcttgaaatgtgactaggacggccgaagaatggaaattttacatctcatttacttttaactaatttaaatttaaaagcagatacttaattcagttattagaaaacttttaagaatgtttggaacagcttgggtccataactccttttccgactctaagtcttatgaaatctagatacagctcaggtacttcagatgaaaatgtagcatccaaattgagatggacctaagtgtaaaatacacactggaatttgaagacttagtatgaaaaaaatgcaaatttttaattaataacttttatactgactacatgttgaagtggttattttgggtctattcgagttgaactacatgaaaattaacctcacctggaacatttaacctaggtatgggctcacactctgtttttgttgggcagtgctgctctgaggcactttcttgctggaatttgactcagagtgctagggagttggaggagaggagagaagccccagctgtggccccttgtttggctcacgtgggagcagggtttcaggctgatggcacacctggccctatagatggccacaaggccacctgtgatgggtctgttgggctctggctggcctgtccatctccttgggtactttgcccaaagagggaaactgcccgttccctccaggtagtgcctttagaaaacgagaatcttctctaacgctctgggctaggaagagagagctgagcacgtctcaccctgggctgcactgcatctcacacaagtgggacatggcctgctgctggtcagggtgagaactctgcctttaagttagaatcaaatcaaatcaaatcaaattgaattctttaccccagtggggtagagagcaccgccaaatactaagctacaggaatgtggcccagaaagcaaattaggttttatttctgcctcctgcctttgccccgctgtttctggaagagaccccatagacagtgccgtgaagggcagcctacggagtctgtggcaggcagggactcgcaggtgagcctggtagtgggtcggcgggttctcatccatggcgctcagcccgtctgaggtcatctgccctcttcttcattggattctggaagcctccccaccagcctgcgagatgcagctgaacagggacttgttttgtttactgctgcatcccagggctctacacttgagcctgacatagagtagggctttaataatctttattgagggccgggcacaatggctcactcctgaatcccagcactttaggaggccccggccagacagatcacgaggtcaagagatcaagaccatcctggccaacgtggtgaaaccccgtttctatttaaaaaaaaaatcagctgagcatggtggtgtgcacctttagtcccagccactcaggaggctgaggcagaagaatctcttgaacctgggaggcagaggttgcagtgagccgagatcgagccactgcactccagcctggtgacagagcgagactcagtgtcaaaacaaaaacaaaacaaaacaaaaaaactttactgaatgggttcatttggaggatgccccttaaatctgatggtcaaatatggccttcatgttgaccttcctgaagtgacatccccgtaggtgggcatatgcatttcccttgggagagattcccagaggggcctctggcttgggattggctaggaacctcagacctacattgtgtttttactctagatctgtaagtgcagatttttcttttttttccagaaactgtttcttggacaacacagcaactactttccattgcaaagaaaaatcctgtcctttgtgtgctctctacaaagcactcacacagccaggctatatcatttgttcctgacaacctgctgggggggacatcaccattttctgcatgtccccaggaaatgggcgggaccacttgtccaaagtcctacagctaaagggaggcacagtgacaccttagattcaggggaactcccatcttggggtgacttctttgccctcagtatattccacatgtcatggaacctaatggataaatctggtttggtcaggcctggagcgcagaactgttaaaggcaggcaatgagagaaaaatctgcgtccttcctcgagggatgagctggctgactgggaaggtccaggctcaggctggcctctgcccaggtgtcctatggcaggggctcatggaggagcactgttcctgttttctgggtcccctgctctgcctcacctgtttaaagtcagtgactcaaatttttaaaactgtgaaaccgtaaactgtccatccctgttcagccttccccaggccacgggccctgcacgtgtcactgcttgttcatggttctcccctgtgttgcctttgaggctcactcatcttgatgactcagagacttgccagagaccctggnnnnnnnnnnnnnnnnnnnnnnnnnnnnnnnnnnnnnnnnnnnnnnnnnnnnnnnnnnnnnnnnnnnnnnnnnnnnnnnnnnnnnnnnnnnnnnnnnnnnnnnnnnnnnnnnnnnnnnnnnnnnnnnnnnnnnnnnnnnnnnnnnnnnnnnnnnnnnnnnnnnnggggtcccccaaacaacagggactaacttgaactttgcaagactcttgaatttcctggctatatttatgatctgtatggcactgatttgtactagagctgagcctgcagaagtcagttgaacccatcctctctatattcaggaggactacaggatgtaggaactcaaacgggatgttgatctgtgggagtttgcaactttgcctagcagcacagacctgcctccttgggagaggcctctggggagggatgctaagccgatggatgtctgtgcagagacaagggactgtccttttcacctgagaggccattctcatcctgcctagtcctgtctgattcacatctgaccccagcttagcccagacagagacatgctaaagcatgttctgatactttctagcttcgattatctccttgtatgctttctttgtatacttagggcccaaaataccataaggtggaacattctaaagtaaaaatgatcccctttttattgtttgaaaatttgtgtttcttattaaaatagaacattttacagttattcacaagataaggtcttactttaaaaatcactattttcctctgtctttctgacttctttttttaattcaagaacagggatattaaggcaggtgatgaaagcagaatttttaataagagcatagtgatgcttttcacaacggacttagaagacattaaaatatatgtgttttgatctttttctggatttgaatatgaaggactagttattgcaacagacagcaaagtaattcatttcggatgcatttcagcaagccagccctctaggagacgctggaataaaatgtggaagtgtgtgacacagaccagactggacatgtacccggcccatcagctaaaaagccaaagagcaggtggaaacaggaataacagtgacagtgatggttaccatgatgaggagcactgccaacgattcctgaacttcccaggtgccctgtccttgcttggtgcttcccatggattatctcagtcttccctgtggctccattagactacatattgtcacatcatccccatttttcagataaggaactgaggtgggctaagtgtcaggccgtggagccaggatgagaactccagctgtctagataacccatgtcctggtaactgccactctgctcccgagtggtcagcatgtaaaccactgcagcgtggggactgacttcaccatccccttggctctgcctctgaccccccgagcaggtgagagctcgagccagctattccgggaattaggcatatactcattttttgcttcagttatttcactaattaaggcaaagtttctggtagtttgacattacgtatctggataattgcctcaatgtatcattttcactttgcaccctcagacacaacctttaatgaaacttgaaaacccaactctccttgggggaaatgatgctcacttctgtttctaggccaggcgcagtggctcccgcctgtaatcccagcactctgggaggccgaggccagcggatcacgagatcaggtgttcgagaccagcctggccaacatggtgaaaccccgtctctactaaaaatacaaaaattagcggggcatggtggtggtcgcctgtaatcccagctatttgggaggctgaggcaggagaatcgcttgaacccaggaggcggaggttgcagtgagctgagatcatgccactacactccaggctgggtgacagagcaacactccgtctcaaaaaaaccaaaaaaacaaaaaccatctgtttctaaatctgtttctgaaagtagttgagggcgcagacttccacttataagcttaattgcccaacatgcagaagaagtctccaacttccctgtttatcaggcttgaaagtcagccttggtttggggcagatggcctgctcctggtccttatctgggagatgagaggttccgacagtgtgatctctcaagtgcctcagtttggatctgagcttctgttctagcggcttccatgcccaactggattgcatatcttaggaagcaggacagaagtgcacctgcactgattactgagcaaattggtctgaataagtgcagtagatgccagagatttccacgaatgatgtgaatgtgatcactggccagaaaatatccatggacgataaatatctgggcttcatgctctgaaaaatgttcctaatctcttctttgtgatccccaaagagatttttaagggagtttggaagtctgccacttgcagaagtcctggtgttcccagcactaagtgcaggatgtggagtctggggtgcgactgtcttgtcactcagatggggctgcatgcccggcacagtgctaagtgcagccagttactctggaatgtgcaaatggcccctctgccccagctgcagagcgccttgcgggtggctcaggtcctagtggggataggaagaatgggacaaaaggaggaggctaagcccaaggcatgtgctgtcaccaaaagtgctggcttcatctcagaaagctgtggctgggttgggcttggttgctcaggggaacagggagacgcagcccaggaaatgagctgtggctgggctggagcccacctccccaggagggaggtgcatggcagcccaggtggggtgcccccatcctaagatgaaaggtctccacctcttgcttaaattgtaaggtgaacgcttttggccatttctaaggaaaagcacctttgggatttgttcatcatccttcatttttgctcaaggttttgggtgtgaaaacctcagaaaaactaagtcaaccaaagactttccagcgatgtcatcgactgtgttgtcatccaaaggggaaaataatcccagcttatgaatatttagaaagaagataattgcaaattgctttgtgaccgtgtaaactcgtttttttttttctttcccccagccagttacataagaggaggtgtgggtcagtcccagaaatagatgcagaagcagtgacagaacacgtcttggcggtggtggagagagacagccctgggttcgagtcccagactcgcagtgtgttagctaaagaagtttgagaaacatccgtctctttctttccatttcagcctcctcccccttcccctagctggtcgacgctcaaagctctcctagcccaacactctgtaacttgaggaataatgttttaaacccccaaatctagtcctcccataaaacccagtgaatctctcaaattgattaaatggaggcactcattttattagataggtaactggtattttgccttttctgaagggtagaagaggggaaaaagtgactgaggggaccaaataagaaaaaaaagacaaaaagacagaagaattcgggtttttagttgattccgaatactcgatgcttttgaaacgtttccaagtttcctttacgggaaaggaatgcaaatgatccaaaagggaggagggatttttttcccccttcttttttgtcctgagctcagtacctgggattttgcggcatgtgctgaaaaattatatcttctgggtgcagaaatttgcctgaaagggttatacgaaactgagaatgggtcaaaacaaaacaaaacggaaaaaacaagacttctggccacaggtaagaatcatataatttactgagacatatcattttggcatgttttgttaagggtgaaagctaatttggaagaggcaggaaggggctcttgaggttggtgggaatgagctgccgtaatggggcccgcagaatcacccttgtgtctgctcccagcaggactggcgggggaggggcagggagtagctctctgtgggtgtcgggaaccccagggccagtgaagcctggggccaacccccagcagtcccacagcagggttgggtgacaacaatttgcctgaaagtcatggagaaacaggttttcagtgacatagagactaagcctagaggcagaattgtaaaacctaccaagttttattacttatttactttttttcttctttttgagatacggtcttgctctgtcacccaggctgcagtgtaagtggcatgatcatggctcactgcagcctggatctcctggttcaagagatcccccgacctcagcctcccaagtagctgggactgtaggcaccaccactatgcctggctaatttttaaattttttgtagagatggggttttgccgtgttgcccaggctggtcttgaactcctgggctcaagccatcctcccacctcggcctcccaacatgttggaattacaggcaagagccaccgcgctcagcccaaattttaaatttaacccccgcccccaacatgtattgggcattctgtctttatgactgggctatgtttttatgtgtgttgcctgcctacctttagaattttcttcaggacttttttttgtaaaagcgaacaaaagaagagactcttttgccttcacagagctgataagactgtcagctggttaaggcggatgctagtcagacaagcacacacaaaaaacggaagtgggaagggttggaggatcagggcagggccagtgtggtctggggtttcagggaaggggtccttgcctgagatctgaagggtgagcaagagcgaatgcatctagcagggccagtggtgttggggaaaatgggatctggctaaggaggctgggagaggcagagatggacacacagagacagcgagataaaggccgccagcaggagtgggggctcgggggtggggttggggggatgcagtgctgcaagggggattgaatgttcccaggtacagcccagcaacgaagaggggctcagggcttgggggacctgcccaaagtcacagagtgggtatggttgtttcatgatctcgtggtgtctcccgggccgcaagccccacagcgccagggctgtgcctacgctgcgcaccctgaatccccatggactcccagtcaggggcttgcgttctgctccgtggccactgctgtacctttgcaaggatggggaaggccttggggatggggaggccatcacacaggcactttgactgcatcaagcgaaattcttacttattctgaaatgacttcaggtctgaaaactgtgtgctttgatcaaatatttacttttccgaaacagaaaccagagcaggtcttgattgtaccagtcagcttgaaccagtcagctacaatgacttttcgtaagtctatttttttttttgagatttcgttttagcccaggaggaaatctgctatctgcaagaaagtcctggccttcataatgaggcctgaattctttccagatcttatgagaaagattccactcttctgcgattaattcagagaggttactaatttctcataccatagatcgtttgctttgtgggagatgactgtgcctcagccaagatccacttattattttttgaacaagttttttttattatcatgtttacatagcactgaggacacaaaacaacgctggaagctcagctgtctgattcatacgctgtattgctgactctcacttctcccttcccctctctactctacctctctgcaaaagaaggctttccttccagagctggcagctgcccctgcttcttgacaggatgagcaagacagcggcggtttaagcaaggtcttcgctgtgctccggagagatgtgggtattctgggggaacatgcctttgttataatatttattgaatgttcacttttccagctctgaatactgaaacttagtgagattttttttttcgagccatgccccatcaacacttttaggttgtctctaatggaaaagagaaaagaaaaagattcatttttgatggactgggcatatccaagttcagtgtcttgggtgataggtctataaataaatacttgtttgacctattttacagaggttggaaatctagattctagatctgagtggagttatcagaaactaggtctgttatctaaaaagctagaggaaattgacaaggagaaggagggtctgaaatgaccttttttttttgagacggagtgtcgctctgtccccccaggctggagtgcagtggtgcgatctcagctcactgcaacctccacctcctgagttcaagcgattctcctgcctcggcctcccgagtagctgggattacaggtgcctgccaccacgcccggctaatttttgtatttttagtagagatggggtttcaccatgttggtcaggctggtctcaaactgctgatctcaggtgatccacccgcctcggcctcctaaagtgctgggattacaggcatgagccactgcgcccagcctgaaatgaccattttttaattagtttcttgtctggatctctctctctttgcctcctggtgtgttggtgggaccagcgttttcatggccacgtcagggtggagaagggctctctcccagcctctccaaagcagttttattcagacattgctggtctgcatgcagctttagccaagccccccaactcttgaaaatgggaaactgcttgatgagtgaatgtgaaagtacatgtccccatcctccatgaggtgagaggtcttcagcttgcgtttaagtccagccctgcctcttacttgcagtgtgatttagggccagccacttcactgtcagagcctcgggctcccttcatcctttttaaaagtattcggccactgattccggctcggctgggtctttatacaccaggccaaagtccttactgttgagctgagatcctgtttgcagaaacgggagggaggaaagaaaaagaaatgaggctgctggtggtggtggttgccgtttgttgagcagttggagttggcaggcactatgggcatatttttgtggggattttcccgtctaatctccacgcctgtccatggggtcggtactgccgttaatctccctgctacagatcagcgaagggaggcaccgaagtgcaaagcagtttgcccgagggcacacagccggtaaggggttgatacaaaccagatggcacgtgtggatgttcacctgcctctgggttttggcttttcatctttcctccccgccatgtttctctttccacaagggtatgtgcccgttcctatgtgcccagcagctgtatgggatgagatcctaggctgcctctgtcaaacgctctttgggcattggtgaacattcataaaacagcatcctctggggtcacattgtcccttttgctcttggagctggagttcctttggtctgtgcgtgtgtgtaaagatgcatgcccactccagggaattctgtggtctgcttggggttttccattgcagtggcagagaagacaagggaaaatgtccttcccggctgcactcccaggcctgtcatttggagttgaatggtaatagaagggtttttttttttttttaaatgatttatagtatgtctggaggaaagatgttattaattcaaagataacttgagaaaggaggggacacagtgcagcttggacagagcttcccactggtgctttgcgcagtctttagcccacctctgccttgccttatgtggtcctatggcctcatttcaattccctatttcacctgatctgacgagggaggcaaggagtgcatgcattttcaacagataaagaaactgaggctcagagacgtgtcttactggacgtgaactcacgtcctggaggcctaggcccagtccgttttctatttgccacaccattttttgtgcaacatttattattttttctttattatctttgtagttacaaaagtgatgcttgctctatgtaagtaaaattggaagcaagatggaatgtgtaaacagaaagcatagccccccaaatgctacccacaatcaacaatgggaaactgtgtggggagtgtattagtccgttttcacgctgctgataaagacgtgcccaagactgggaagaataaggggtttaattagacttacagttccacctggctggggaggccccagaatcatggtgggaggcaaaaggcacttcttacatggctgcggcaagagaaaatgagacagaagcaaaagcggaaacccccgataaacccatcagatctcgtgcttatttactatcacgagaatagcacgggaaaaaccggcccccatgagtcaattacctcctcctgggtccctcccacaacacgtgggaattctgggagctacaattcaagttgagatttaggtgggcacacagtcaaaccatatcagggagtgaatgtgaatgtgcatgtcccatcctccatgaagtgagaggcagtttgggcttcagcttgtgtttaaatccagttctgccatttacttacagtgtgatttagggcaagccacgtcaccccacccagagccaccgttttcttatctgcacaatggggcgattacacctacctttagcgttgtctaaaagtcagaaagagatgagaggaagcaggttcccagcttgatgcctgccataaaatggcagctcatcctggttcctttccctttctccctacaccagtgcttctcaaactttcctcttcgtactcaaaggtgaaagacagtgagagctccctggggtttcccaggctggccccgacagcttgcagccagcaaggcaagctggatctctgcaaattttgtgtcagttagtatatacgtggatataacttcatttgaaaacaatgttttcaatgtttgaaattttgaatattttaaacatggaagcttcagtttgtcttacagcttcatacagctcctggctaacctctgcacactggaggtagaggggctggcacacctccacatgcccacatgcccctgggggaagcacacctttgcacactcctggtggggttggcacacctccacatacccctgggggtctggcacaactccacacatccctgggggcctggcacacctccacacacccctggggggctggcacacctccacacacccctggtggggctggcacacctccacacacccctggtggggctggcacacctccacacacccctggggggcctggcacaccttcgcacattcgggggggacacacctttgcacattcctggaggatcctggcacaacacgtttctgggggggcagacacacctctgcacactcactcctgggggaggtacacttctgcacactcctgggggcggggctggcacatcaaacactcctggggaagaccagcacacacgggggagggttggaacacctgtgcacacactgcatgggtgctggcacacctgtgcacacactgaatgggggctggcacacctgtgcatacactgcatgggggctggcacacctctgcacactcctgaggtccctacagccaagctgggttggtactggagctgttctcctcacctcttggcaggcttagtaagggctgggtctgtctgggggcagaaaatgaatgtcagctgacttcaggtgaccccctggagaaactccactcgcctggctctaaaaccctccagaggacctcgccatttatttgggttgcttggtctttccatcagaaagaaataaattccaatgaagggttttcaggccgttcttctcattgaagggttaaccagattcttattttgctcatctttggaaataaaacaatgtttagaactacccggatcagcaaggccatctggtggggagtgtgcagctgctcccctttcagtcgcgccgcctgtaatggattcattctagggtgcatcgtgcatctgcagaatcatgatttgcagttggttttgaacgtgtgagctatgtgtccatgcgagacctttctcctctgcccgtcctgaaggacatctgggccgggcatcttccactgtcctgcagccttttcactcttcgtgaagtcaggtcaaagtgggcaaggggactctggggacctgagagtggacagagtcaccctgctccttctgtccttaatctgtagtctctgtgcattatactctgggctgctgcttttcattcatttctctatctgtgtcaaggaaaaattgttggacagcaactagaatgtaccactcatctttgtagtctaaatacaccacagccagaatgacccctattctgaaaatgggtcactttttcctggtaattgaggtttgatgttgcaggtgtttgagccccaaaaacgtgcaaaaagaataattataacatgtattaaacatcctgggctcctgagatcactgcacccatggaacaatgctgagccttccacattgactttgagatgaagagaatgagggtctaaatggtgaaggggtttgcctactgtcatgtggctggttaaaccgtgtggccggtgttcagcctaggccttgagtctccagttcatccctaggccagctcgctgtcctgtattctgtaagtcatttgggggaggaagtgtatagcattacattctctgggccacagtttccccacctgtaaaatgtaagtagtaattgtactgtcctcttagattatgacatttaaatagaataatccatatcaaccccagcctggtgtctggacacaaggaagccctcaacacatgttagctggtgtcactgttgttgtgactcagcaataagaactctgttctggatatttgctggatatttgccatgctttctggagcttgttccctgactctttaatttaaaagtatttattgagcacttactctgtgctattcaggattgagcactactgaccctggccttttatgaatcttgtagtccagcctcgcctccttacaagggagacgggtggccggtgggctgagtgatggctgaccgtgctccactgtgagccttgagttctgagcaggttcccctacagctgccaataacagcttcgttcgcctgctgcaggagaaaggtcacaggctttgcagccacacagaccagcggttggattttggccccaccactggtgagtcctgtgactcagggttatgtgtttaaccctgctgtgcctcagtttcccatacatgactcggggaatctcagtgctgacctcagagagtgccttcaagaagggacctagcatgatcctctgcaagtggcagacactggactatcaggcatttccttcttcttttgccgccaaccctaaactgactccgtgtgctgctgaaatgctttgcagctatatgactgtcctcgctttgttccctagagccattttggtagacgcgcttctcggcacaccctgtaagctcctcttgagtggcctctgccttattggaaaaccggagtcagtagatatacaagcatgagaaaatctagtccctacactggtgtgatttactactggaaataataaaatgagcactctgaaatagtttttctctccacttggtttcagaaaaaattattgattgtgtcacaaagacctttagagtcttttgtgcacattgaaatcattggggggagaactgcagcatgaacatatttgaagtctctggtccaccctgccccttcgctgagaaaacctgattattttgtgcatttcagagagactgggacatctgctgtgtttggcccatatctcgggtggttgcacaagggagctggagctgattaccctattagagagcaagctatcacagaataggaaaaagaccccattctccctcctgcctgccacggccagaggccctggttcactgaatcactgctgttgttaccacgcttgtttggcttcctggagcagagctagttcttctgcagattctctggggctgggtgggcttcacggctgtccttgaaatgggatatacagtcccgaatgtgggcatttttctggagcctctggagtctttgttctggcgttagatgggatgttcccagaggacccaggctgttcatttatttgtctgtacgaacggacacgctgcagcccaggcctgtacgactggacacgctgcggtctttgtctttggagccccagcaaatgcaagccctgcacatagtaggtgtttaaataaagaggtgcaaaagtgcgtgggccactaatctggagaaaaccctgtgtctcttttggattaattatctggctaataaagcaagcgctgcgccggctagtcaacgctcactgcaaaatcactggcctctgagcagccctgaaagacataacagatgaagataatgagtttgtattaaggagaaattaacttcagatcatacacccatgagtgttatggccaaaaggggtagtcccaaatccatatcttatatacggagaaacagaggccctgagagatgaagtgatgctcagggtgaccagccaggttagtgatcaggacaccaagtagctccctgccttgctgggaaggtccctcctttgctgctctgaagttttaaaatgcaaattatcatggaagccaccacctgggccgcagcgtgtccggtcatacaggcaggcctgggtcaaagtgtgtccggtcgtacaggcctgggcctcagagtgtccggtcgtacgggcccaggctgcaatgtgtccggtcgtacaggcctgggccgcagcgtgtccggtcgtacaggcagggctgggtcaaagtgtgtccggtcgtataggcctgggccgtggagtgtccggttgtacgggcctgggccgcggagtgtccggtcgtacgggcctgggccgcagcgtgtccaactgcacacagcccaggcttctttgatgtgcggggacaaaataggagttgggggctgcgcaccggggcctgcctcctgtgcatggggccagttccattcctgtccattgtctcagctgcaaaggtaactgacaagggacagccccgcctctccttcctcccctgcccctgcccgcctttctttctgtccttccttcccctgtccccacacttggcaccaggccagcctctacacatctccgttcccccatcccttgtctctgtcctggagctgtacctgtctcctagcacactttcctggctgcaggagacaagcctgagtgatgaatagagtctgaattgagacaggttaagactcaatgccccaggccgacagggcattcaaaggagattgaaggaggtaggggagtttcatcccatcagctgcctcctgggatgcttccctcaccttcctgtcctgtgtctctgggtgagactgcaaatctgtattctcggaagggattcctcaaaagattggaagggggaagggcaccaagggcctggagaagccgctggactgtctgaggccaggcctgggtggtggggtagaggttaggatgggctccctcttgagggatggtggaagactgagtgtcaggctcctgaggcctcttgacccatctttctataatgggctgcatgtccttggggaagtacagaccacactggccttggtttctcctctataaaaggcaggctggatgcaggtacccgcaggtttgtactggcaagctgatgatttgctggagcccacctgggttttgccctgggtctgagtgtacccaccatcattgttgagaggttccgggtgtttcttactgtgaatgactgcagtagaatcctcagggatcccaggagcttcactgtcttgcatttcccatctgtacagcagtggctggtttaccctggatctttggggatgggtgcgtttctggaaagttggcccttgctgttgagcactgaaacaagttctggatgagcatggtcatttggaggggggtgagcttttccagaattttccccacagctgcgccaggctcgccagagctacgggccctggtgacaggggtgcccgaatgatcctggccagctcagctttttagtaccttgttctactgtagaacttgggtgttacttcctgcatctgtgtggccacctgccttttccagggcatcccctcagataagtggcagacaggaaaattggacaccggtgtctggaattataatatatgcacactgaaagcaagtaaccctgcagtgaggacccaagggtctctccagtaataatgcaaggaatccgggtcatttaccgagaggcaggggagccagagatcacctccaaccccctccttgtgagctcttacgtgggctcctgaactgcatctagaagccaacttgacaccaggcagacaaacaaaagggaagcaaacacactttgttagttttacctggacctaggaatcttcacgagagagtgaagtttgaaggagtggccaaagcaagatgtttttagaccttttagacaaagaacaatccatttcagaagagacagaacagaagggacctggtggagtaatatacatttctaggggagtctctgggagatctatgggatgtgtaacggcagtggaagagaagggttactttgtgaagtgtatttatcctgggtcattgcagccccaagttcccaggctgtgctgaggagggccattttcttggcctggcaggggaagggtactcctcccagaggagtctatggcttggagtatgcaggaagagacaggtcagctggccctttctgaaactataatttctccaatgttttcgactcaaaataatcaacatatcaatttggcatgttttgggatggctcatccttccacggtgtgcggggtactagactctgggttaagcattttgtgtatgtgacctcatttcttcctcacatccacagtaggagactgagatcattttattcccattttacagatgaggaaacctagtcacagaatggttaaattcgttgcctgagatcatagagcagttacagacttgattcgggttgaaatgcaggtctgcccaactcccaagcctggcataatgtcttattttcgactgcttggaaaccatttttcctacatcccatctttctaccaagttgagaatcagtgagctcaggacgcaggggaggcgctggctgcatattgtagagatctgatcttggggaaatgcctgtttattatggatatggcttatggactaaaacaatagcattgaatgtacgttgtatgcatgtaaggtagttgtgattaaccaaaaccaatgttgatgacgaacttaacagagagtcaagtgtgctttaaaaataagcttaaaaaactgcctgggttttgtatgcacagattttgggccagccaggaagatccctcaggttgtggtttgagaatacctgttttagacaaagcacgggtgatgtgtcccagtcatcaggaaggatgaaatctggcaaggaaaccgtaaggatcagattacaggaagggcttgctcagggagaggaaggaagcaaggaagaaattagtaactgaaaagaggcaaggaggaaggcctcttcatcaggaggtgggggagtgtggggcagtggataactaaaacaaaacagctgtggttgtcataaacacattttgtcagaaaataacctggtgtgttattttctgatgtttcagccattgtgtcttgattcaggaacagctcccttccgagtttctttttgtttgtttgttggtttnnnnnnnnnnnnnnnnnnnnnnnnnnnnnnnnnnnnnnnnnnnnnnnnnnnnnnnnnnnnnnnnnnnnnnnnnnnnnnnnnnnnnnnnnnnnnnnnnnnnnnnnnnnnnnnnnnnnnnnnnnnnnnnnnnnnnnnnnnnnnnnnnnnnnnnnnnnnnnnnnnnnnnnnnnnnnnnnnnnnnnnnnnnnnnnnnnnnnnnnnnnnnnnnnnnnnnnnnnnnnnnnnnnnnnnnnnnnnnnnnnnnnnnnnnnnnnnnnnnnnnnnnnnnnnnnnnnnnnnnnnnnnnnnnnnnnnnnnnnnnnnnnnnnnnnnnnnnnnnnnnnnnnnnnnnnnnnnnnnnnnnnnnnnnnnnnnnnnnnnnnnnnnnnnnnnnnnnnnnnnnnnnnnnnnnnnnnnnnnnntgagactctgtcttgaaaaaaaaaaaagaaaagaaaaatcaaccctttattatgtctctggtgtctttaggaattggctgggatccagcgggtattggctgctctgggtgggctcagccaggtggccctgctccacctgtctccccctcctcctggccaagcaagtgtgcaagaggacaaatgagtacacaggacatgtcttagggcctggcacgtgccagctttaagcccacttctgcctcattctgctggccaaagtgagccacccaactcaaaccgaagggtggagaaatacgtcactcctgtagctgaaggccctccaaagtggcaaagaatgtgaacatgggaagaagaaaaaattgagaccaataatgcaatctatggtaaagagtaataaatgactatcaaattcccattgtgggccaggactgtgcatctgtaataccagctaacatttattgagcactgactatgggccagagactctttttttttggcagactcttgatctgttgcccaagctggagtgcagtggtgccatcttggctcactgcaacctctgcctcctggattcaaatgattctcctgtctcagcctcctgagtagtgtggattacaggtgtgcgccaccaatcctgacaaattttttatttttagtagagattgggtttcatcatgttggtcaggctggtgtcgaactcctgaccttgtgatttgcccgcctcagactcccaaagtgctaggattacaggcatgagccaccgcgcccggccgggctagacactcttttaagcaccttacatgaatgagttcactgaatgcttacagcactgccatgatacaggtcctgtgattattcctaagtcgtatccaaagaaatggggagaagagacgtttaatatcttgttcaagatcaaacctgggcaacctggctccagcactcgggctcttaactccagtgctgtacgtgatctgttgctagcggggacttcttttgaaaaatacagaggcccagaaaccttaagtgatttgtccaaggccgctgggtggacatggacttggaatcctaatccatgtgactgctgtgtcctctccgctgtgctatgggccagtgaatgttgacggagtggtgtggctttattctgcttattgactgggatgtgatcaaaactgtcgaagtccagatagaagactgaatctgatgatttataatttgtacagaactcttcagtcttgttggctttcttctcagtctcagcaacaaccttctatcttagagctacatgtgaaaaatgttccttctcctacttgttgatgaatagtccttgaaaaaatatatttccatatatatagcctagagaggaatgtcagcagttacacatactaatcagaagaaggctttgtgttttagtaaaggttaattaagacccattgaattttttttccttaaaacataaaagaaaaataatgtaattagctatttttttccctctctgtccccagagggcaaatgtaaatgttctacctaaatgaagctatttgtttaaatccatccagatttcttctgaagtttcatacatctttcttctgctatatcagcttatagctacaataatttaataagtttttcctagggtgaaattggatgccctttatcgatcttacactgagggggcattcaattacttaatctaaagtggtatttctgggtctctcaattacaattttgttataaatggcttgctaatgatgcttgggtgcataggttaatagggggtgtccaagcaagggctgggtaattgaacactttctattttgggacccgttatctgatttctctcctggtgccaggttcccacagtgatggtctgcagccatcaggctcagaattgagcccaggtgggaagcaatctcactgaaatgtatacctgaatcctttggtttaatacatgaacggaagtgccaagggccccgtcttgtctgagtcgaccggcaccaaatgtggacattccagacaggtgaagtgcagggggcatacatgactcctttctgaaggaagaaccacttgagtgttaggtttctgaatgactgttcttgggataatttgtggcctacggaaaaggccagatacagaacgtaacagcaatccattttcctttcaataccaccccgttaattggatttttcttccctgagttatgttctttaatagttatacatagtaaactattctatacatattttactatgtatatttactatacatagtaaaaattcttttgaggccaggcgtggtgcctcatgcctgtaatcccagcactttgggaggccaaggcgggctggatcacttgaggccaagagttcgagactagcctggccaacatggtgaaactccgtctctattaaaaatgcaaaaattagccgggcgcagtgatgcatgcctgtaatctcagtactcgggaggctgagacaggagaatcgcttgaacccaggaggcggaggttgcagtgagccaagatcgtgctgctacactccagcctgggccacagagtgagattccatctcaaaacaaaaaaaagaatatgtagtatgccttccttcttgcactcgagcaaatcccacccctgactttggccttcaagactctacagagcctggtccctgcctcctctcccatcaggtttccacccccaccagcctgtgccccagggcctaccctgccagtagccctcatgggctgggactccccacagcgtctctctacggggcctttgcttcccctggtctccacgtgactggcttccttcttgttcaggtttctcctccaacgtcccctctgaaatcaggtcttccctgtcaccctgtgtatcatacctcccacttctttaaggcagtagctccaacccaggggtgattatgcaccccagggggcactgacaatgcctggagacatttttggttgtgacatgtcaggggaaggggtgctatggcatccagtgggtgggggccagggtgctgctaagcatcctactgtgcgcgggacagccctgacaacaaagcatgggccagccctaggacggcacaaagaattccaaaaccctgttccaatggttgtattgctctctcccccttttctttattcttttctgcatagcctttatctagcagcatctgtgattatcttattcatttgggacttctttatagcttgtgccctgcagcccctacccctggtgggacagaagctccacttgggaacaggcctcctctctgggtcagccctgcaccactcgcgcccgtcaggggaggtcttgtctggaagccgccgggctctagggccttcacttacaagggactcacctggtcttcagattgcttgtccatcttactgagtatttgacatactatacagtggctatcgattttggtaaaaacttgtaaatgtaagacagttttatgtttttttctcagagaggcccccacccccacgcccaccgcagcccaggggtattttccaacaccagcaaatcctccaactccagaacctaactgattatcttaccagtcaattcaagtctgcccctaccagaggcagcctcagactctaccggtttgagggctcggtctcaccagactgccccacttcagatgccagtcccaagtattgggtccccaggttacccgcacatctgtccaaattggctaaaaaggcaagagtgtcccacaacctcctcaggttcagtaattcactagaatgactcacagaactcaggagagtgcttgactcatcatcagtctattatagcatagaatgcagaaacagccagcagatgagacgcatggggcgaggtatggtggaggagggtgtgtggagcttccatgccctcttcctccactccaccctcccagcacctcgaaggatccaccaacctggaagctgcctgagccctgtggtttaagggttttgatggcggttccattacaaaggcctgattggttaaatcatcagccactggtgattgacttaatctgcagcccttattccctacccggagtttggggggtttgttgaaagctgctcactgaggcttggtctttctggtgaccagcctccatcctggagctatcctggcccgcaaagtgtcaccgcatcaggatacactcaggtatggctgaaaggggcttgtcatgaatgacgaaaggtgcttctctcaccccatcattcagaaaaattccaaggattttagcacctgtgtaccagtacccgaggatagagaccaaatactcatctcttatttccacatcacatccctcatcttgtattggcttttggtctccccctacctggacatgcgcaacactcagctgttcttcaaaaggtatttgttgaacaaatgaatgaatgaatgaaagaatgctaggagctgagaaaacactgtatctgagtgttttgctaaggctcttgcagcatctcgaattgcctcctcaggtctttctgtttaggaagcgggactcgcagaggccgggctggttggtgggggcagctgccccgcagacatgctctgtggacccggtccgggcaccccatcttccctcctctctgttgagactgtcggctgctcatgtttttactttgcttgaaatgagctgcccctgcccttgtttaggaatgttttgcccattcgtttgggtccagattatgtacattcctatcttggagcttcaaagtccgtgttttgtttgctttttaaagaatctaattcgattttctgcagcagaaagacaggagggtgcgaattccctccccgctgagctgctggttggagtctcatttttaaccccggcttggccctgtcttggacatgtgaaaaaatgttttcttggctttaatgatggagtttccaagtaggggatcttgcccttttgtttctttagtttggaagaattgtttgtagcaagcgatgggtcaggggtggttgagcaagtttgaagcagaggttgatccttgaggtttctgacatgtccctccagctgccctcagggataagagatgggggtagggcctgagatgtctggcctggcttcccagaactggccccttctgcatccccgccccagcgcctctgcaggactcaggtctcagcctctactgaccagcctttctcaaactggctccttgataccctagtgagattccttggccaattaggtacttccaactttgtgtattatattcctctcttgtggattcacagggcttattagcatatcaaaggccctgaaaagttcagctgtaaagaattctgtgtaattttgtccattccacattttctccaaataatttaagcacagaacactcaccaacggcaagcagaacattttgtgggaggaagacattttgggaaacacagcttggctatttcttggccaccatattttgagaaaacatgaagttttcagtccaaggggcatgaacatttcttctgttgagttctgattgtttaatccttcagccagtacatggcgatcttgatgcgcggttagttaatgctgcctctatggagacagtgagggttgtttgaggggtggcgtgggtagagttggagatgagtctaccactcttgggtaattttcaattgctaaagaataatcatgtggtataggatctctcatctttgattccatttcaaatgtttttggcattcactgacaatgaaaaatcatcatcataatagttgatgatgctattattatcaatgctgtctaccttttatggtatgctaaatatgtggcaggcattattcaaactgtttacatgtagtagctaatttagcacctgttaaggtgtccttattatcctaattttactattgaggaaaccaaagctcagagaggttatgtggcttgctcagggtcacacagccaattagtggtgatctaccactgctagaaactgagtaggtctccttttatgcttatccatggctctttctacgacatctacaaagaagtgtcatttgggcaacaatatattttataaccacaggattctattaatgggtttttaagaatcatatcttgctcgagatgatgaaagtgaaaaattatgtcaggttctgaagctctgtgtcactcgagggaatcctatacattggatttaattgcttaataacttaaagtcaagtagttttttaatatgatacattctactgaaggagagactcatttcattgtttctaaattttcattaacttttgcttcctaatctgataataaaggttaactctaagaaagagactgctgatgccagtgagagggaaaaaacacattttctctgcctgctccctttctaaccatcctccttagtattcttgagatttttcattgactgaaaagcactgatatttcaatccatccctcaaatttgtagtcattgactgtgcatgactctgagaatgatcacaacatcctgggattcagagatcctgtacctgagaagtatcaaggcagagggattaggggagatgtagactatgcacaatgtgagacgtttgatgtggcgctggtggtgctgggattggggccatgtttggtggcagaaattgagccccaaagccagctgcaagaacctgaaacctcttcctttatgctcgcgattttctatgacttgcttagaaccaggctggcttggctggacttagaggtggaaaagagagtgagcatctgtctctccttggaggatgagctttgggttattgctattaccacacaatgtaataaagcttcttgtctttctgtgtaggaaatctggcattttttaaagtttgcgccccacaaagaggaaatattccaaaggtactcaggatgtaaaaggggagatcttcacagatgcctccgtggatggcatggcaatccatccatcaatgagaagaccatgatttcttttaattttctgtgtgtttccacattccccagtgagaattcttccacctttttttgtgccatgggaaaaacctgaagggcaggcagagctgctcccgaacttgtgaccttctctgaggttgcagcggctcttgtagaacatgactctgggacatcacttccttttgttttctttcggagctgaaccaaagaatgtgcaccctctttctctagtgctgtggtgtctgcttatttttgtatttgtgctttccatccatcttctgtgatcacaaggcattcttaaggttttctagcacgacttgcggacatccagactcgtggggggcccacccatggctcggtaagccagcagcccagggcactggcactaccatgaggcactgcattaattgctgcatacagctgttacccgacggcgcacacaagcagcaggtcaactgccaagggggcccccatcacggtcaccaggcgtgccccacgtgcaaaggagaaaacaaaattctgtttcgtgtggacagtaagcagatgaacttgcttgctgttctcgaagtgaggactgaagggaacgaaaactggggtgggtttttgcgcttcaaaaaggggaagcgatgtagcctcgtttttggactgataataatgaccttggtaatggcttcttacatcctttctggggcccaccaagagcttctgatctcatcacctttccattacggaggcttccccagcaaccccagcttgatggacagcgaaaacccaagtgacacaaaggagcatcaccaccaatcctctgtaaataatatttcatacatgaaggactatccaagcattaaattaattatcaacagcatcacaactaggattgagttcacgaccagacagctcccagacttagaagaccttaagaagcaggagttgcatgtgagtagctttgtgctaatcttgactgattggttgatttttagaaatgagtgcttttctttctatcaccatctttgggaacacagaaggaaaatgactaaaaaatgtcttagatgtagcaaggatcatttgacagccttatggatttgaatgcactgagagagtgctgtttgcttacgctatggagtgccaggaagggaatctgctgtcctgaacgctgggctaggcatgttcaagggccgctggctctcattattgcattccaggacttcttgcttgatatgtggtcgtggtagttaacagttgcttttgcagatcaccatcatttgggattttaaagttgcgttaaatttgattttctgcttctattctacattttaatctctaacggcaatttaaatatacaactagtaaaaagattctgcttaattaccgtgtgtgcgtgtgtgttgtgtaagtgtcagaaaggtaaattatggtagaatggattttaattaaacttttatctttattctctccaagttttttttttttttttttgttttttgtttttttttttgtggggcggcgggggagaggaaagcacagtcattgaccgtctaccaagttttgctttatttgttaatcattgtcaaatattagttcaaatttgaacacggtcgtcagtctcagggcaggttcccattgcggttagattgtgtctttgctcattttcccctcctctgtgtctctcctcctctgtttccttgcagatgttttcagtcatccccaacaaattccttccaaacagtaagagcccctgttggtacgaggagttctcggggcagaacaccaccgacccctacctcaccaactcctacgtgctctactccaagcgcttccgctccaccttcgacgccctgcgcaaggccttctggggccacctggcgcacgcgcacgggaagcacttccgcctgcgctgcctgccgcacttctacatcatagggcagcccaagtgcgggaccacagacctctatgaccgcctgcggctgcaccctgaggtcaagttctccgccatcaaggagccacactggtggacccggaagcgctttggtgagtgctgggtcccagggctcctgtctggtctcgttccttcattcgttcattcctcccgcaacgttagcgctggggttggggggcgagggcggcagaaagagatggcacaattcccttgttaggaggctgttcccaggcaaagacccagcagggtctggaactcggttcccagccatgcagtgagcattgattgccagctgtgtgcaggacacggggacgagtcagaactggcagctcttcttgttccgaaagcccgggcacatgacccgagcagtcagcagtaagtgccagtggccagtaagggccagcaagaagggcgtgatccgggctcttggctcccagctctgtgctattccctgctctgtgccgctcccagctctgtgccgctcccaagctctgtgccgctcccaagctctgtgctgtttcctgctctgtgccggtcctctgctctgtgccgttcctctgctctgtgccgttccctgctctgtgccgctccctgctctgtgttgttcccctgctctgtgctgttccttggctctgtgctgctccctgctctgtcctgctccctgctctgtgctgttcctctgctctgtgctgctccctgctctgtgctgctccctgctctgtgctgttcccctgctctgtgctgttcccctgctctgtgctgttcccctgctctgtgctgttcctctgctctgtgctgttctcagctatgtgctgttccagctgcagtcactgcacctgggggagactgagttgcttcaggcctcagcttctctgacctgccccgtctgccttatgggttccatatgataaccacatggagatcattctggaggccttgctctcagccctttgccgcaggcttaccatgaccactgcccatccctctctgctccagcttaaccccatgcaccctgcggtcctcagatcactgtttcctctctgtaaccttttccttgtgccaggagaggtttggtcactggagctgaggggtgatacgtgcctattgtcaaccagagtcctggcaggccacgagggtgttttccagtaatggactcaggttgactagaagggaatcttcaaagttttccctagaccaactcttaatgtgtttcctgacaaacgtttgctttcatccttttgatgttcgtcctacagtgagctaaagtgtaaatgtttcttttgtggtttagcagccgccgctgtaggagccagggtttcacatccctatgcatttgctggacgtgtctgaacacactcccttgctgtagggtgctcccccgaggctcacagtgatttccccttaatgaaaaccagctttctaccggcaggaaaggaggaagaacagaggcgggcctctggaatctagtcttcaatgtcaccttgaacctcttgttactttggccacggatgttctctttccaatttccattgacttcaggagttgtggtgttgggaagtggatttttaaatgtttgcaagtgaaatttatttatttttcaggcagggggtgaatttaagctgtatgtggccgatgccagaatccatgtctgtctagagtatgatcagttccccgtactgtttggacaaagggcagggtatttgattgaacagggggaggagagagaacatcaggcaggtgctggctgggccccatgaggaaggcatcatggagtttataggatactgcccttctctctcctgtgggcagccctcggtcctctctccctgtttgacacaacacatgcatcctgggtgtcatcgctgcccagccacttacgagtcccacctgtgcacaagttaaccagccccagactttgtccctccaagcagacatgtttctagctcttgagtaggtgttccagcctttaatctgccactgtctagcttagtggtggtatcttccagcccttgaagcatgcatggattgaagtgggtagccaggccgcatagacccccacccccatccccagcagccctttctgaagcttacctgggctgagcctcttgctgctgtcgccaggccctttaggcctttccatctctctttggttgctgtctgggaggccatcgctccagcagtagcaactttgtcctcagtatctcctgcttcttggttctcataggaatcgtccgcctaagagatgggctgcgagaccgctatcccgtggaagattatctggacctctttgacctggccgcacaccagatccatcaaggactgcaggccagctctgcaaaggagcagagcaagatgaatacaatcattatcggtaaggcttctgtgtcactctggcagggctagcaccctccctggggtcctggctcaggctccaggcctagcccagctctgcttcacctccagaacatttacatggtggcagcaaacttcttttgagcctccacttctccacctggctgtcactcttaccactacataaaatgttcacatcacttgaacattactataaagtggaaatgttgactttctaattctttggagacttaaggacagctgatggctttcttgagaagttgccatttctttgtttttaagaaattaagcagggatattgacttcttttcctgatgtactgatctgataagtttggatgggggaattataagtgcagttaactggttagtcatcgatttgctgcttggggcttttgtaatccctggccactgggaccatataagacggaggcagcttctcctgaaatagactcagctctgacacatcgcctataactaattgctgtttaaaaagcctagcccctgtcaacctcatgcctttgggcattcaaagtgaggttgattaataataatttgttttaaatattcacaagaatattttataagtaaacatacatatttactctttaaaatttattttttattgtataatttaaggtgtacagcatactgtgatgtttcgatggaaatagagacagtgaaatgattgctacagtaaagcaaattaacatagccatgtttttttcacagttacctttgtgtgtggggaggggggcgtgtgtgtggtaaaagcacctgaaatatactgtcttggaaaatttccagcatgcaatacaggattaataggattaataactacagtgcacatgctctaccttagatctctagacttgttatttgcctgacataattctttttattggattcagcttagaaggcgtttatccactgatgccttctaaaagagaaattgagtcacgttttgcttaaattgtttaccttagatagtgatctattttttaattttcctagatctgttatatttgcaatctccaaattaaataaatctattagcaactaagaggaattataatcagcccttcgaaagatgactttttaacttaagactctcctgtccaaggggacagacttatgtgcctaagtcctgacttaactcttttttttcttttaaactcaaagaaattaagtcactgggagtcacctccagtatgatttggctgttatctagttttttgcaaacttgggagtccaaactccccaaatctcaagtctgacttacatttcattgtgactcctataccatatgcctctgggaaaatcacatgttcttatgaaagagatgaaaatatgtattctccggccaggaaacagagactaagataatgaatgaaaaaggaaagcctcagtttggtctcctaattttgcttgctccaagattttaaaaagaatgaaaaataaaatcactgtgctgatatttacttaaagcagagtttggtgagttctatggtagtcttgtggtgtgacaagtatctagccctgcttgggccagcggccagctctgtgccttgcggccgttcatttttcctgttcctggactctgtctgcacctctgcaaagtgggattgttggaccaggtcagttctagactccttccagctctgaaatgtgactcagctctgccccagcgcttcctctttgttagattcggggcagaaacagcaggatctttcatcatcttgggcccctaggtcagagaggacctttcttctgctgtctttttgacagctagagtcacacaagaggttcaggattcaagtggcctgaacgtgatggctgaacttgaggccggagctttagacatgttgaaagtctcctgcctctactcccaggtacccatcgtggtactctttgtttcttgaattgccatcgtcccccttatgtcttaaggtccgagagaggaggggccgtgctttcctcccctgatctgtccctggtgccaagcacaatgctgagcacggattagacactaagttaatgcttcctggatggacgaaggatggatggtggctggatggaaggaagacagtcaggtggatggacaaacgcctccatggctctaaaaccagttcatttttgagatctgacagaatttgtgccaatttagctacagagttcacttgtcctttatattcttattcattgtgagtagaattttcaagggacttctgattgactcgttttttctgtatcctagggtattatctctttaaaaaaagaaagaacaaaaggccagaacagagctgttcacctggatgtgattacgcatccgacagaaatgataggggcctgcagggatatgatacacttgtcactgaccaaagagactcagtcatctggctcagtctctccccagataagtaactttcagatgtgtcctgtggtccttggcaaactgtcaggaaatcaagtgtagagctgattgatgaatttcctttttcctaaacacacacatatacacacacacatacacgcacacacactgtctctcctcaaaccctcaggaaatttggcttcatcctctgagagagtctgtgctgttggaatgcctgcctgtgtcttggcatcacctctgtgctgggacgtgtgtttgccatttacatccttcactcgtgaggaccatgatgaaatgtgaaactggctgggacccagttcccgttcacccaggctgcactgagtaggcgccagctgcgtgcagagcagtcgcctcgcaggagacagggcgtgtgagccctgtggcaaagcccctctctcttttagtcttagagtatgctctgtgatgaacagttacagcttcaaggaaggaaatcacactcaaattcctcataagggttagtgttcccaccctcctcctttctcctgacgctttggaaggaaatcatctagtaccagctccaggctcctggtctgctagaccagttctcggctcctcccggctctgaaatgtggctcagctctgccccagctctttctctttgttagatcctgggcagaaatgtcaaggcctttcatcatcttgggcccccagttcagagagaactccatctattattactagaaccatctactgtatagaacatatattggaatactatacaggaaaaccattttcaaaaccacctataatttcccacctagataactgctgtttatgttttggcgtgtttttctgacagactgcattctcagtgggcccttaaaatgccacagagctgtgcactgtgagcaaagttaaatactgtgaaactgggggcccaggtgctaggggaaggtttcatttttgnnnnnnnnnnnnnnnnnnnnnnnnnnnnnnnnnnnnnnnnnnnnnnnnnnnnnnnnnnnnnnnnnnnnnnnnnnnnnnnnnnnnnnnnnnnnnnnnnnnnnnnnnnnnnnnnnnnnnnnnnnnnnnnnnnnnnnnnnnnnnnnnnnnnnnnnnnnnnnnnnnnnnnnnnnnnnnnnnnnnnnnnnnnnnnnnnnnnnnnnnnnnnnnnnnnnnnnnnnnnnnnnnnnnnnnnnnnnnnnnnnnnnnnnnnnnnnnnnnnnnnnnnnnnnnnnnnnnnnnnnnnnnnnnnnnnnnnnnnnnnnnnnnnnnnnnnncgagccaccgtttctgacgcaggacttcatccacgcctttcagccaaatgccagactgattgtcatgctcagggaccctgtggagaggtgagcagtttctgtgtgttgtatttggggtgagaagaggaacttttgaagaacagtgttcccctctcatgacaaataagattttgtctcctttagaaaaaattaaacaggtcgggtacagtggctcatgcctgtaatcccagcactttgggaggccggggtgggtggatcgcctgaggtcaggagttcaagaccagcctggccaacatggtgaaaccccatctctactaaaaatacaaaaattaccagatgtggtggcacactcctatagtcccagctactcgggaggctgaggcaggagaatcgcttgaatccaggaggtggaggctgcagtgggccaagatggtgcaactgcactccagcctgggtgtcagagtgagactccatctcaaaaaaaaaaaataaataaaataaaaacaaacaaaaataaacggaacttgcaacgttactgctgtttcttacgtaagtgttattcttgaggctgtccccactgagttgacacatgttgcagatggttttcttaaccattctgatcctggtctgtgtgacttcagccccagcaggcctgaccaggggcacaggacggttccttggtactgtcaaggcgagggaaacacccttagaatcaggggtgtaagcttctccacgtggtttaactcctagaattctgtgtctctccacgtggttgatgcctttatccttgtctgcgttgaatgtacagtttccagctttccttgagagaccaaaaggaagaacaatgctgagcagagcagctttgctttaagatcaagggtttcccagtgtgggtgaggccagggtagtgggatattgaacagccactatggggcggcctggctggcactgggcactgcttgcatcatttatgcctgtgtgaatgcagaatctcagggctgccaggacctgaaaattatttggtccagtgctccctccaatacttccacatcagagctaagggggcacctgtctaatccgaggccctctgagtcagggaattctccgcgcaagatggccagtgtagcttaggacagctgtgttcctattttgagaccaggtctgttttggggaaacatccactcattggtcctctttcttctccatagagtcagacagaccaagtctaatccttccaaaacaggagaggctggcgatatttaaagacagggaccacagccctttgtgtcttattttcctttgggccaactacatcttcttatggattgaattgtgccccccaaaaagataagctgaagttgtctcccccagtgtgtatgactgtgaccttatttggaaataggatctttctttgcagatgcactccggttaaaatgaggtcatactggatcagggtagaccctcacccaccctaagacacagggagcatgcctcttgacgaggctggagtgatgctgccaccagccaaggggtgccaaggagtgccggcagccaccagaagccaggagaggagtggaacagattctcccctggcatcccagaggaaccacctctgccccacacctgggtttcagactccagcttccaggacactgagggaagaaagtcctgtcattacgcaccacgagttcgtggtgatttgtcctggcagccccgggaaactgacccctgggaccccttcttcaggtggcataccttcctggccccacgtatttgccaattataacaataaggcgtgtttgttgtggaaattttggaacatatattggaaaactgttttcaaactattaatttctcacctagataactactatttatgttttggtgtattttcttccagacttttctatgcaaataagtgtgtgtgtgtgtgtgtgtgcacatgggtgtgacaggacagtcttatgtcctgcttctttcactttgcattgttgccccccagaaacatgctttaaagtctgctctggtcacacttctgagctgatgtccctcttgtggagtctgcatggctcccgctgctctgagtatgacctggtcagggagaggctggatctgccctccctcagccccagcgctctgagcctgagctcttggtggctgtcccggtgccatgccttctagcaggtgccaggtgtggtttcgctccctgctctctgcatctcccagcccaggacttcttccactctgttctgaggcaggcactgacttgccgtcccttgccatgtcccacctgctggttcccgtgttttggaggcagaaatcggccctgctgagtggtctccctccatccagcagggctgacgcacactagccgagctctcatggtgacataactgtcacctcgagctgacccctcgccgcccccggaggtgtttgcatagctgctctgcctccctccccgacatggcccccagctgaagggcgcaagtgctcggtgtgctcatcaaatgttttcctgtcgctgctgcttagttcctcattctgagaaaggtcagaccacgccttaacctcaggggccgagagtgcacacagcagccttgtgtactgtctgggcacagagaggtgggggcccatctgtcgggactgggtttggtgtgtgtcagccctgctctgggccctgggagactggagctcccagtggggacgtgggcatggctgtggttggttgcagttctgcagagtaggaggtgaggagagtggggctccagagtggggagatccagaaggaactgacctggagaagactgatgccagactgggttttgaaggatgaataagagtttgctgtgtaaacaaggcaggaaggtgggttaagatgaagccttccaggcagagaggaggacaggtgcaaaggaaaacaccacatgttctcctgtttagggtggagccaaggtccctgttaggggttggagccagggtccgtgttaggggatgaaaccatgggccctgttaggggatgaagccagggtccctgttaggggtggaaccagggtccctgttagggggcggagccagggtccctgttaggggatgaagccagggtacctatcaggggtagagccggggtccctgttagggggtggaaccagggtccctgttagggggtagagccagggtccctattaggggtggagccagggtctctgttagggggcggagccagggtccctgttagggagtggagccagggtccctgttaggggtggagccagggtccctgttagtgggtggagccggggtacctatcaggggtagagccagggtccctgttaggggtggagccagggtccctgttaggggatgaagccagggtccctgttagggggtagagccagggtccccgttaggggtggaaccagggtccccgttagggggcggagccggggtccccgttagggggcggagccggggtccctgttagggggcggagccggggtccctgttaggggtggagccggcgtccctgttaggggtggagccggcgtccctgttagggggtggagccggggtacctatcaggggtagagccagggtccctgttagggggtagagccagggtccctattagggggtagagccagggtccctattagggggtagagccaggccagggtccctgttaggggtggagccagggtccctgttaggggatgaagccagggtacctatcaggggtagagccagggtccctgttagggagtagagccagggtcccctgttaaggggtagaaccagggtcccccgtttagggggcggagccggggtccccgtttaggggcggagccggggtccctgttagggggtggagccggcgtccctgttagggggtggagccggggtccctgttagggggtggagccggggtccctgttagggggtagagccggggtccctgttaggggtggagccagggtacctatcaggggtgaagccagggtccctgttagggggtggagccagggtccctgttaggggatgaagccagggtccctgttaggggatgaagccagggtccctgttaggggtggagccagggtccctgagtatgtttctttcttcctggagttctggtcccacctctgaggataccaacaccacaaaggtgagtgctggaacagaagacagcagcaccgtgcaggtgcaagcggctcagcaaggagcaagacctgccaaactcttctctcttaccccagcctgagtctgccagctagaaggaggctcacagttcacagcatggtccccccaagtagtcaccgtgttttcttcttttaataacaaatactctatgtatcctaggaactgaatgtgaaagcttcttgcctccctggtcctcagcctaacagaaatagttggtcaattcaaacacatattcagcccctgccacaggctgggtgctgtgctgggcactgagcatacgtgccctggtgaacaacagtggcgacccagtgcctaccccctggtagctggtgctttatcagagaagtgggcggcggcttcgtcatggctcatgtcctggtgctgaggggaagggcaggatgccagggcagcagcgtgtgttaggacgctgacccaggccttgcattgcctgctgtactaattagtactgctgcggaaaaagtttgccaaaacttagcagcttcaaacagtttctgggggtcaggaacctgggtgcagctttactgggtcctctacttaaggtctctcatgaggctgtgacctagctgtcatcaggctgggggtcgtcaatatgcttgactgcagaaggacctgctcccaagcgcacatggttgtgggcagaattcagcacctcaagagctgttggaatgagggcttcacatctttgctggcttttggcgagaggctaccctccatacctcaccacagggcctctccggtatggctgcaggctttatccaagccagcaagctagagcgtctgctagcagattagaagtcacgattttttctaacctagtcatgagtgtgaaatcccatcgtcattgccatattctgttggttagaagtgagtcatgaggtctagccacactcagtgggaagacactacagggtgtgaataccaagaaccggggatcactgaggaccgtcctaggagtcagccacctcccgttctgcacctgatcctcaggaaactggggcctgggctttgcagccgggagagtagcttccagcttgatcccagctctagtggcagaggaagtgtgtttatgtgcatattttctgtgtaagttactgacatagcagctgtttcatttcttcttaaacatttataaaaataagtaacaataggaatttcttctttttcgaagcccatgacccatggcctgtctgaaatggttggcgcgtttcccatctcagccagaaaggatgataaatactgtgtgtttaggtcactcttgaagaaacaaacactctgagcccaagttccatcagtctaacgggatcctgggccattagccctgttctgtgaccttgcacttctggaagcaggagattttgggggttgctggctgcaagttggattggtccaagttgttcttttccttctataaattggcttggagaggggaaataccacttttatttttagttttaggttcacattcagcctttacttctataattgatccaaagtagagggtttgaaaatgttggaattttaagcaaagtcaaatcacttttaaatttccagagaaggattcaagtggcaagtccatttttttttttttttttctggaggagaacagaggaataatggaaacaagtggatgggatggttcatatggccaaagaagccagccaagaattcatgttccagtttcctctctgtaagagatcatgacaatttaaaactagcttgatgcattcctatgctaaattggcccagttaattaaaaagaagccaccaattgcaagcagaatttttctttatttaatcccattcgtaagtggtaaagactattcttttcaaatgcatctcacattagcctcctgcctcttcatttgtgagacagttgatagtgtttgtctcttaattcagaggcagttatagcccccgttaaatgtgaaaaatgcgtggaaggtgctggcacctccaacctagttgcattcctcctttattcaagggacatttggagtggggtcatgtaccatctgttaaggattttaccgtgtctatgtttggggtttgattctgtgtgtagtcttaatgcaatgcccagaaacaacccaccacaggaatggttcattttcccattctgtgatgatgagtccaaagggaaggagaactcagcttggcgaagaattcaaactcgattttgacccaaacccctggagtcttggaacctggctagttcttttcttcatctgcttatataaactgattttttaaacaacccgttggactggtcaaatgattcagttatgacgataaactaggaaaggaagcaggcttttaatgaaatggattctgttataggcagtcactcatggggacacagaggaatagcagggctgaacatttgggcaggaatcctggtttcatcagtttcactctgtctgcagagtgtgtgagggggcctcagggtggtgcacagctttcacccgctgagtgtctgggaggtgtaccggggtcatggtggcaggaacacaggcattggaaccccagccctgtcacttactgctctgtaaactgggacaagaaacttaacctctctgtgccttattttctcatcggtaaaatgggggaagatagtcctacctccagggtagtgagagttaaatgacttaatatttgtagtaacgtgtttaaacagtgcttgacaaatggaaaatatgtaactattattattattaggtatcagttattactaataataacaataaactgatcactcatttactcactccccagagttgcaaaccacataaccaagttttggtcaacagtggaccccatatatgatggtggccccgtaaagttataatcccgtgttttcattgtgccttttctatgcttcaatacataaattctaactcttatgttacaactgctcacaggattcctgcggtacaggctgacagcataggagcagtaggctgtacctcgccacctaggtgtgtagggggctgtgccatctgggtttctgtgaacactctatgacattcacataatgacatcacctactgatgcatttctcagaacatatatatccctgctgttaagtgacgcctggctgtatttattgaacacccttgatgtgctagatgcaagctgtacataggagaggaaaatccatcccgtttgctctcatggagcctctgtctagttgagggagtagggccaggcttcatgtaaatgactgagctggggcagcccctcagagctatctctgggtgaggcttctcccatccacccatcattggacaggaccacctgtggaggcttaaccttggttgctgctggtggtctcttcagctgaggctcgttcccaggagggactgggctgtgagttattagcaggatggctccccagttttgcaaagctctgtaaataggaaggacccggtatttgtggatgcctaagcctggatgcacctcattcacctacttccacatcagagggagcaggatgcccgccctagggcaaaagccagcacacacagaagggagctgagccggattcatgccttcgaaccgcagcggaactttgacttgagaatctctcttgctattcaggcagcaccggaagcccctctccaaacagctcaacttcccccagcccctagaagcactgattgaaagccctggatgtgttctcaatcagaagagagcctggcactgggaatgtcatgcgatgttttctctagaacagatttgcacaaggattaaaacgcaggctgttcctagcactgagggattcattattgatttaaaccatctcaaagggaaattaggagaacgcctctgtggagaagagacggaatgaggagaaagccgtggggatgtagaggttgcagcaatagccacggatcgatttctctttctcacctctccctccagctctcactctttcctttcctctaagattttggaagattaagaattacaggggtccttgtgaggactactgtagtgcggtgtctttattgaagctgcctattgattcctggtgggttcaggcattttgcttcccagaagctgcctgttgacacaccttgatatgggccctggaagcggcacgaggtcactttaataggactgagctgttgagccacctgaggtcaagggggttggcctcgatcacagagcggggagggagagctggcagcgcccaggccagaaggacagctcgggtctttgtgaaggggttctctgaagactgttcaggagggactgcctggtgaggcgccacatcttgttattggtgggagaaaaaccaccaagctgaaaactcccaagtgttgaacactgtttatgttttggggaaatgtttgtgaagtccttggcagtcctgtgtattcccacatgattgtttggaaaggacggttccgagcaggaggaacactatagggaaaaagagctccgttgtgtctgtatctgcagagatcctaaggtgagatgtgtgcccgctgggctgggatcagggagggcacttagaaacgaccctggggcagccacagttcagggacctgtctcacccggagttctgggctgcttagtgaggttgacgctgttgaaggagggggtggcagcacatgtcacatactggccccgccccggtgtgcagtggccattgccctgcagtgaggggcccacaccctgcgcctggctttataaccaggggtagcccgccaatcctcagtgcaccccagttttcttgcttgtagaaacatctgccatgagagtcactggtgaatcacgagaaggtgctttgtaaaccacgccaggctcggagatgtcagggatgcttggtgtcgcctctgagaagtgctgcctcccagtctgtgaacagttaccggggccctgtgattggatgctctggaaggaacaaagaggggctgggaaccccactcgtgcacaaggaacctagggcctggtaggaaatagaatggccccaacaaacagggcacctgccattcatttgggcgtttttaggaccaaacatggatgtttgtaactggcagaaaatgagcctcaccagtgtcacccctgtgttcagtctaaggtgaccttggacattccctccagatcagctggcctggccagtcctgtctcatccagcctcctgatgagacagtcacagtttgtgattcagtggaacaaaagggctccgtctcagctacattaaatggcctttttttcctggtaggaaaaaaatatataatcattattgatggcaccatatcacaggctgggaattattgatcagtgatttaaattcggatgccagcaaatggagaataacaaggccaggtgccctggctccctctcattacaaccctcacgtggccacagcactgcaagatgttgttgagggtgaattggaggacatgagtgtgtccccatctcgggtcctcctgcctgaggaaatggggccgttccggtaactgtcattgaggagccagctggggggttggggggtgtttgaggagcacggggaggtggggccagcgtcaccggggtgagccagcccagggatggtcacctgctcccagccgcctgcaacttcagcaccagcttgggatcttttctcaaaggtggccctctgagaagtcccatacgtggagcagtaactggaggacatgtcagagctcaaggccaccaagcgcctgcccttgtctgagctgaagctgagattgaagcttgtgcgtttgggtgccttttgagctgggtgatctcagtgacttctgacatgagtccctgtgggaactgctgtgttagaaccagcagtcgctcatcagggttatgaaaacatcttgggactggggagtggtggtgttcacacagctgtgtggtgtatactaaaaactggcgaattgttcacattaaatgggtggatgctacggtacgtggatcatttctcaatataaaaacgatatgaacaaaaatacaaaaggaggaggaacccactatggagagaggttttcccaaactagtggccttggagccaggtcctgcagagttctccacatagaggccaggccgatgaacaaccacatcatcacttaggaacaggaaccgtcaaactctaatgagctattgcgatcaccaaggaatattagcttttccaagagatacaagatcccgcagtgtgttccggcttcatgatagatgcctgaattcccttttgctgttgctgtcacttttctagatgccggatgtgatgttccgtaaacacatttgctgttcccgaccgtggcattggagttcctcacgtttatcctaagtgtttatttgccactctattacatttgtaattgtttatcagtctcctgtgacttattaagtagttctggagaagaattgactttctcttccaaatcactgtgcacctaaaataataaaaacacctaaacaaacaaaacccgaaaactatcagtgcagacggccagcacccactctagtcagccgtggattcgtctccttgcctaagctcggagggcaggggccacatccagctgggtgaggcgctttggggtcaggcaggcctgggtttgtttgggtcccagccctgccctggagcttcctgggctgcgtgaccatgggcaaactccttaacctctctagtgtcagccttctcccccagtaaaatggggtggcccacatctcattatggggttgtgaagatagacgcagagcatgcatgcagcaccctgtacagggcatggtggtggtggccctccctaccccccagcatccacatcaggagtggaaactgagaacattgcaggtactaaacccggaaagcaatcacacagagccctggcgggaggagcagcagcagctcctgctttaatagtgatcaactcaccaacctctgctcgctggctcagaacagcacgctgtaagtgtccctgaatgaatccagcagtggtcttggctgtaagtgtccctgaatgaatccagcagtggtcttggctgtaatcatccagattttacatagtagggccttgccactgctggcctctcctttgtcccttggggagagacatggtcactttcagaggcactggattgatggagccctatgccccctaacatacatttcccatcccaccgctcctccaggggtcccaggacccctgcactgcacaggaaaggggctgagcagtaccccatgagcacgggcccagtgtgaggggccgcgccgacagccttctaaaataaccgcagcacagaaggcctggaatgcatttggacttatatttggaattgtcgttggaaacagtcctggccaaatgtaatacccatctgttcgggatggtttgagagtaagaaaatgaggtggctcagctggagggggctgggcagccctgaaactcagggctgggagggtatgatgtcccctggcccccacgctatcctggagccctccttccctccagcctaggctgctcctgccttctaggaccatcccctcgtgttagcctgccctgactggaggtatttccccttgcctgcaaccaggctttcttcccgaaccttctgcccgctggtcagtccttcaggagttcgggactgggctccttcctgctgagtttttgcatctccagggagagcagccaggtttggtgcccagcactgaaagcaagcatccgctgaggccgtgagctgcctgtcgcctggctccaccctcccacattcctcatgccgtgcccctgttaatgcatcctggggttgcatccgtgcccctgcagttctgtgatgattgatcgtgagctgtgtgttttccattacattggtctccttcccccacttcctcatgggatagtggattttgaagactaaaaggtagacatttcagtttgtttctgtacgtttcatcttgttccacagtgtgcctgtctggccttttgacgtccagtggatacttgttcttgatatgtttgctgttctcagcattttctgagtggctttaacctatccgagtggctttcccccacccaagattattaactcactcttttcccctggagagtagtcaagggggaaatgatagctttgttacttgaagacaatcttaggaagcattcgcttaattcttggggagaacccaaagagtgctcccccgtctcagtgctcccctgtctgagtgctcccctgaagggaagtgctcctgtccgcatttgccttccttcatgcttccttctgggaaatgtggccacatgaccccagtcctcccctaccctcagggccactgttccagggtctcagggtggcagagaagtattggcaaaaataactccttggagtaattggtcttccttagaattggggtttaaaatctgtctggtttcctagggcagtcataataaatcaccacaaacttggcttcttaaaacaacagaaatgtagtctcttatgattctggaggccagaagtcctaaatcaagatgtctgcagggttggttccctctggtggccctaagggataaaagccgtcccctgctcccagctcttggtggcctccagcagtccttggcgttccttggctcatagacgccgcactccaggctctgtctccgtctttctgtggtgctgtctgtcctctcctctttttataaggacacctgccattggatttgggaccaccgtaaatccaggaggatctcgtcttaagatcctacacttaatgacatctgcaaagaccctatttccaagaaaggtcacattcacaggggctgggcttcagacttggacataattctttggtgtccactatccatccaactacggaatccagatggtggccatggcttgtggtgaatctagtccctgttcagatgtctgtgacacagcaggatgccagggacccagcatagtttctcgcagtggggttcgaggggctcccaaagcccactgccagttctctgagcagatccaaagtacccagaggtgactgagaggccaaaggagtctcttttcatccagccgaggaaggagcgtggcctggctctcaaaggctgtacatgtgactcacaggaagtaaggtagtgagttcactttaacccacctcaaacagatgaaaatcagccgtttcacctgctaggggtgggcttgcctggttggaacagtaggtatgtcccagtttttcctagggattacttcttgatctctgaagaattgtatggaatcagcagattcctcatgaagtgactttgtatttaaaatcaagacaagcttaggtgcttttgttttatttatgagccaaatatctgcaagaaatgttattaccacaaagaaaattctcagtatggaaaccttcagccagtgtttgggtttgtgtgaggtaatttatgtgatggaattccagttccaccaaacaatttgggtagttctgtgggcatctttggtaaaaactgggcttcgaatacttatttaacgtgggattttatgacagtttcagaagcatctgttacttttcattgacgtagtttcttgggctgagccataatattgacaggactcataggaaatgtgtgagccaggaagggtacccctcagaccaattgccacctggcacccctcagtgcacacagccaaaccttgcttgaaggttcacgcgtgtctgattttggcacttattgaccagccatttaggtcatagtaaccatgagcgaccctatggcgacagatgccgtgtttcagttttgatgtgtcttctaattctgaagaaggaaaatagcacaggtgatgttggggacaccagtaataagctgatgtggtgttgtcttggggaatattctcaggcgagtgtggatctggggaaatctactcagtggccaccgagcccctttgctgactgtctctttggacagtttggctggccaggctgtggtagatggaacactcctgttccggtgggtgttttgattctaggaactctgtgggtagatctcaaactgctcaagacttccaagaggtgtcctctgtggacattggccgtggatgaattctagagggctgtgtcagaggcacccgatgtgccaaggtgggctacggaggtggatagcttctgggcctgtccctaagaaatgctgctcctcatatcatgacctcaattagaggggagggcagtggagaaggcgcatttgcaacagaccctgctataagggagcacagtttttgcagggtagtatgtggctgaaggtctgggagcgtttggaagtatggatggcggctgggcgtggtggctcacgcccgtaatcccagcactttgggaggctgaggtgggtggatcacctgaggtctggagttcgagaccagcctggccaacacagtgaaaccctgtccctactaaaaatacaaaaaatcagctgggtgtgatggcaggcgcctataattccagctactcaggaggctgaagcaggagaattgcttgaacccgggaggcggaggttgcagtgagccgagattgcgccattccactccaacctgggcaacaaaagcgaaactccgcttcaaaaaaaaaaaaaacgaagacggaaatatggatgtcagatacctggatgcatgggtgcagaatgagagtcacagaattgccttccctggaaagaggggaagccaggttggagaagttgaaggaatagaaagtatagagctttgaggagagagaagtgtgaccctgtggagccacgtaggccatgtttttcataagcccagtttcacccttggcccagagatgcaggtgtgtgtgcaagaagagagtgggacatatggcaggaaggttgaaaacagacaaaaagggctgcaaggagagagagaggagaaaaaagagtaggaaactcacaccctgaatgttctgttgaagataaaaacacctctttttttttttttttgagagaggttctcactcccattgcccaggctggagtgcaatggcatgatcacggctcactgcagcctcaacttcctgggctcaggtcattctcccacctcagtctccagaatagctggactacaggcacgcaccaccacgcctggctaattttttgtatttttagtagagacaaggtttcactatgttgcctgggctggacttgaactcctaggttcaagtgatcctcccacctcggcctcctaaagtgctgggattacaggcatgagccactgtgcctggccctgacatttattaaaatggcaatgcaggccttcttcaggaccattgtggtaggtatagggactgccatgacagtttttcagtagaggagagagactccgaatacaactaggaaaagtagggattttaaagccgaggcaggtggatcagttgaggcaggagttcaggaccagcctggccaacatggtgaaaccccatctctacgaaaaatacaaaaaaattagccaggtttggtgggcaggcgcctgtagtcccaactactcgggaggctgaagcaggagaatcgcttgaacccaggaggcggacgttgcagtgagctgagatcacgccactgtactccagcctgggggacagagtgaaactctgtctcaaaaaaaaaaaaaaaaaaaaaaagaaatgccaaggagcagggcgagggggttggtggctagaaaattactaaggggaaacatcaagggggaaggggtggggattctggctaaaccaacccgatgggattcttgctggagacaggccaggtggccaggcatctcctgggggtggtggactaggaacctgatcagataagaagggtggtcagttaaccaagggtgggggattctggctaaaccagcatagcagtgtcaacaaacaatattttgacaaatttagtttagagatctcactggtgtttattagcacggtccatgaacagggcagcatcccattcctgtaatacgaaggtgctcctgtgggcccagccaggttctggctttataggcagaaacgggctgaagaagcaaaaacaggcaacggagagtggattgttcatttcagagtgactttccttctagggttaaagcaaaggggacgtctgactggttgctgtgtatcccctggttttttggaaactggcccattccgagttcagttcaattacgtggcacctagcacagatgactctgttctggcctgtgggggcctattgcagaagctcagtccagaacagtagcctctcatacattttatttaacagcaggattcttgctaaaatagggtggtgcagagatggacctggaggtaaaaaagttaaggtctagttgggaggaggatacagaggagcctgaagtgggtcaaggaagacgatcagttcccgtgcggcagcattctgccatacgtgtgtgtggtgtctaggaacagatctgtgtccacgggtaaacgtgtaagtctgcaggtattcctgtgcatatgtgggggtgcttttacatcgtgttaaaaacaaggtccctaccaacctagaaagatacatctcatcatttttttttcaatgtcaggaatgcgtatgcaaagtagtgggaatttcatgcggaattgtaatattgtgagagcaacagatgctcttatttttgttcccttcagtagaggagagaggaatgagaaggtgcataaaattttcatggcttctctttgctagtgtaccatttttgtaatctggtattgtttgaagctccctgttactgtgaaaacagaggctgcctgagatgatagaacaagcaacaccataaaagcggctggtggtttgtgtggggccagtatagacatgtctgggtctggaagagcttaggtggccacgagaagggcgggagctcggagggatgagggaggtggctcatctgcaagggaaagaagaagggtggttgtgcttcaatcaggaaaactagataatgtaattgtacactgattttcattgtcgcccaaatggtgtgattgcatgttcatgggtagtaaaaatatgcatttattttattcacaggttgtactcagactatctctactttgcaagttcgaataaatccgcggacgacttccatgagaaagtgacagaagcactgcagctgtttgaaaattgcatgcttgattattcactgcgcgcctgcgtctacaacaacaccctcaacaacgccatgcctgtgtgtacccccccccccgtaccccccgagctggcccctggcagaaggagctggtttgttgttattatgcaagcggcattgtgggtttgcgtttcagcataggaacagagagaagcgttttaatgtgcaaatgctgttccccattattcatggatgtaaaagctgaaaactgatgggctcttggtctggctcctgccttcctccctgctggtcacctgccacctccccctcctccctcagcaggaggatgagggtgcctttaggaagattaccatttagcaagacacccagcaattagaatcggcagacacgaggacacccaactctcaaattgtcttaagagcattctcttgagcggtggattgttttgttggtttaaaaaactacccatcaatgattttcaatgcttctttgacagagtctcaattgaaaaacattttctgttgattcctcaatcgtatctcttgttcttccttcagaactatgtctgtaaatttctagcctttttgaatgcaaaaagctgttattggtgaattcagcaccttttagccccgggatagttttccatgctgggctccctgggctggctgtgtacttcaacagcagggcttatgcagcgagcattgccgctgcgtgttccagagtggctttacaagccttgctctgctcagcgtctcgcatagcaaggcaccaacaggcctgctgtggagtcttggaagcccccaggtggtgggacttcaggccaagaggctctgccccctctttcttactacagaggccgtgggatctgggaggcagcatgcaggggcagcaggtgggattccaggctgccctgttggactttgtagtttggcaaggaagatgccacagggacacaggtaaccccagagcctgctctggtgccaggtaggaggagtacactttggaaccagccattggtgtgggtcaggtttccagcttggccatttgctggctctgtgactctaggcagttgtctcagcctttctgagactcagttgctttgtcatacaatggggtaataatgctgctgtaccaggctgttgtgatgggtctgtcttgcattcctgcgttcattcttgccactatgtcccctgcatgacgctgggtcctggggccacagcaatgccaggacaggtgtggtccttgccttcctgtgcagctggcggggagagaagatggaggctgggcagggagctctggccaccagagaaccacctgagaacggggcttcaggcaggttcttaggagagggaatgtctgtgctgaggcctgaaggagagttggccagggaactgagagcagcgtgtgcagaggcccagtggtcagcaccacctaccatacagaacgcagccagccgcctggtgtgggagatggggggcactgaggcagggggcttgggtgcgtggcacatggggccgcaccacctggtctagcctcagaagaagtctagacatcaccctgagagagatgggacccctcagagggttttaagcagaagatagtgtaggagtggaaaaggaatatctcactactgtgttcatggctgaggcacctataataaaagactaacgcgagaaagcacacatacttgtttaacgtaaatttcatgtaacccgggagggagccttcataaggaaacggagacccggagaaacgggaaacctgtgcgtgtttgtgcttgggtttgatgaagagagcagtcggggagagggccatgattgtcaaagggggaatgactcaatggctctgtggccaccgtcacaggggacacagggtctcggagaaactctatttgtgtgtggcttgaccagcacagcttgtcgacccggcttcgtgacccagaaccactctcagctgtgactcttggccctggacccctacggagtgagtctgagagagcaggcagggcagcccacccggtcctcaaggcagctccctgagggcggtctcagggctggggctggcaggaggaaaggggcgctggcatgacgcctcaaggtggggttgtggtttcttccagcactgatcatgatgctgagcagagaggggtgcccagtgtgctgacagacacgaatcaagttgcagctgtgactcaggccaggcccatttcgtgccacatctacactttcctggtgcaggtggctcttccatcctgcaggcctcgcatggaggaccttcagtcctggcataaacagtaatagcagcagctcagagccagggctattatgggtcaaatgccgaggttggcacacaaatcggggaacgtgctcgcggactgggtttccccatcatcctaccatgcctgattcaatccacccacgagtccttttccctctttttcccagtatttctagagagctccactgttctaccctctgctattgccctgattcagccactggccctttcattgtaacctccacctgcacagcttccctctctctgggagacagcccctccccagaccccttctcaccttgatccgttgcaccaggcatctttctaagatgctgaactgccatcactattgatggggttcaaggcacactgcccccaaatataacagcttggcatttgagaaaacagcagaagcagaaaggccattcttgcctccctgtcccctcctcctctgaagctggccataaaatgctcagagcagaggtgccctccctgtacatcctaatctctgaagatccgggggcacagaggcgaatctgaacagacaggcctggctgtgtctcccccagtgcatgaccatgagataatttccctttacagggattcgtggctccgagctcacttctttggctggcactcatgctctcacttaatcagccagtatttataaatgcaaagcaaagagagggaaattccccagcattattaaatgatataattggaatcctaaacaactgtaattacaaacaaaatgtgtgacatcgtcaggagactgtctccaggtgaatttaaagcatggctgggggatttgcctactttagtgtgggaagcaagggtgcacctttgtcccctgagggtcagggggtgcaggacccctccaggaatgaatcttgagggaaaagtccaaggaaaatccaagaggaaccaaataggagtgttgtcccatctttgataggggcctcctttcagggaaggaagagcttggtgcacggccttcaaggcttgtctgaggccagcaccctgactgagggagggatgaggaggaggaaggcattggtggttcccggccccagccggccaggtgacccagtttgcctggctcccttctctgcccaagtgcctcctggtagacaagagccaccaggtggagcctgccgaggaggctgtgtgtgctggtcagagtacggatgggaagtgatggattcagccagtgtagactcagcaccaacctggcactacaccttaacacaggccctcccatgcctggggcttactactgggaaaactgaggctcagggaggcagccttcctctggagtcacagccagtaagcagaggatctaggacccaaatctaggccttttaacccagcttcccctagatgtgtgtttggcttcaacatttccccaaccatctgatcttcagtggttgctactctgcacccacagcgtggcaggccctggtccaagagagaaggtgcaggacggtgctgtgaccagttgtgtgcttggaatgaggcctgtgtctccacctgggcgtttctaccacattgtgccttttgaaactttctcctcttggtgatcctgcgtgactctcaaaacaaacccgataggtgggtgggaagacaggagtcagtcattgtcactgtcagcagatgaggacagtgaggggcaaggtatccggctaatgtggtcgtagaaggtgccagagccctcccctgcaggccctgggaccactgagttctctctgcaggaggctgcctgaaaaggactgggaaaagtggggcaggtgtgggctttgcactggggactcctaggaggaagtggcttaagctgggctgggtttagatggacagggagaggcagggcaggggggaactcctgacccaaggcacagtttattttaatagctttaaatagtgtttcttgctgcagaagagctaatatctaatatgcacgtacagtctgcttgctaccgggcactttgtaccatgcagagtgtgccgactcccatccagcgccctgggggcaagcccttggatagtttctcccacacagaagggagggtgtgcccctgccctcctgctgcgggtcagcactccgactgtgaactggagagcacagctgaaactgagccataagttcatgggcaccatcgtgatcctccctgtgttgtgtatgcttgagtcttcgtgataaaaggtttctaaaactccatctgtgagaggtgaaagggatctaacctttgttcattactgccagcccctgtcccaagccctttcaatgcatcgtctcattagagatcccctgaaatccatccctgttttacaggtgggaagactgaggctcacagaggttagttctcccatccatagctggtatcaggcaggctcaaggttcaatcctgggtctgctggcgtttgacactcagggagtttttgccttccctagctggctcctaaaagcaaagggttttgctggcaggaggcctgggcttttatgctcaattttgcgttttgctgaggatgacaagacagtagcttagcaggtgcctctgctcagaggagatccccaggggcaggctcagtggacaggaggggtgcagcagtaacagattgtcccttaatcttcagtccctggagaactcacacaccagagaaagagccaggcaatcagaaaccctccttatagaggtgaattttcatttctgggaggagaagccggtttccctccagatgtgaatcccagccctgccacagccctgggagggcagctttgtaaggcaccctgggccccggcacaccctgctggagtcattcaccgccttcctgtggcacccggatgcaggggcagcacagacccctctgcctctggccagcccccgccactgttccgcagcacaccctaccctgaggggtgctcagaggggccagtgagcctgcctcagagcagggtcccgagaagcctggtgcctggatgagcagcagccacagcccctgggaacttgtcagaaatgcaaacgctctgccagtcccagacctcctgaatcagaaactctgggtacggggccatggtgtgtttctcaggccctccaggtgggtgtttgtggggtccggttggagagccaccagggctcgtcaccactccctccttcgtgccctctggggtcggggagacttgctccagggcttgctttactctgactgtcttctctctccacccactccttttctccattgcatgcatcacaaggtgatcgcggaagtctgtttctttaccagttgagctctgtctccatgagattgcagcctccctgaggccagggccacttctgttagcagcaaatcaccattgcctagcagggtgcctggcacatggtggcacgagctcagcttatttgccaaatgaatgaatggggactagtggggaggctggctggggactcccaactgaaatccctagtaggggacggagaggctcggcctggtacctgtctggggagaagtggggactgggactgtgctcagctcagccttggctctcggtggggattgcttttccctggggccctgcatgggggacaagctccacaagcacaggtgacctggcttcaggtcctggctccaagggtattggccactgaccctgagtagccccccccgccctgccctgcacctccatgtttctattggtgaatcagctggcacggttaacttcaaaggcttcttgcagctctgatgttttctaattttaagcacattggacacttgccctaaatacgctttttatttttgttctattttgattctctgtcctataccgggaaaaggtgaggggaaaaaaaatctgctgggggctgtctttgtcctgtcttcatggtgcatatggttgcagtagtgatactgcctgcaccagaaactgtcacttcaggtgaccacactccccctgcttggcaagggggctgggggttggggtgggaattgaggggcgtttggagcagatagatcagagggaaggcacaaagcgggaggggagctagccccgggagaagcagccgagcgccaggaggcctttgccgcctgcagcccctgcggtttcctcttttcctccgcttcctggctcagccctgcctgctgaggaggaccatgctgcggtgcaggcctgtgtccacctgagacagcacagggggctctcatgaggatggacacaaacaaggtttcagagaactatctgtcaggtgcaggtgcccagccaggtgctcggacagactacagctgctctaaaacaccccagcctgccacaaacacctggctgctttccttctggaaagttctcctgttgaaaggcacgtcctctggaaaagaaaaacctcatcagactggtctcccctacgagggacggcctacaagcctgccagggagacaactgaaaagccccgggaggcgggtgacttaacagcgagttggtactcgtcatgattcgtactgcgttggaggcgacaacgcatgtttatttctgagaccggcacgttctcattttctctttagtttcggcccagcttgaggtcttttttctgagctggcatgtgaggtagcaacagtgtgggttggaaacagctaatgaattttgaaggcaacttatccactctaattgcttttcttcctctccatcctcctccatggttagaaaaataatgaaatgggaaaagaatagttagcatctgtacatattttgcccaatctttcattgtcttattattagcactgtattcagcagttgcacccgagaaccatgttgagggccagagtgcaggctttgcaaggagggaatggtggagaagccacagtccctgccctcaaggtcaaggtccaggtcaagttgggcaggaaaggaaatgtgacatgagagtgtctgcctaaaaaatgggaactccagggaggagcctggggagccaggaagtgctgcatgtatgagaggatgagctggaagtttaagccaggcccaggactttctacacatagaaagccatggaggctttaagcagggctggctgtggccagatcactgctttggaaagcccatgctggtggcagggtgcatatgagagtgcagagaccaggggaaggaggactagccaggaggctgtatcagcttcaggcaggtgtagatggggcataaacaaagggagtggtgtgaactggggagaggtgggagatgagaagttctgggcagacacagataggcagagcagggtccctgggcacttggagaagaggcaaggggagaagccctggagaagggggcctcacagcaaaaggggatgaggctgtttttttctggaagctttgctaagagtttagggtgaactgtggagttagaggaaactgttcctaagactgctctcacttctgacaccagttgcaagttcaggagagatattctccaacccaccttcaggtttagtaattttccagaaggattctcagaacacactggaggctattacactattggttatgatttattacagggaaaggatgaagattaaaatcagccaagggagaggaagtgcagggggcagactccaggaggggcccaaatgcggagctctgagtcctcctctccctgtggagtcatggacggtgttagtgccactggccatggtatgtggcaatcctcgtggagtattgccaggccaagccttgggggtccaggccttttactagggttccgtcacatgcagatgctgtggctgacctttagtctccagtcctaccagagtcagaactgataccatgtggcccaaggccccatcatcaatctcagtgttagcctgcctatgaccaaagccctcaggccaaccaagacacttctgtcaggcaggacatccaggggcccagacatcacccccaggagccgagggaaaggcccgagttctctctgagtagagttaaatcttcaccacacggcttgcagtaaggcacgagagaaggaacagaagggtgaagacccgggaaatgggtactggaaagtagaaaggacttaaatagaaacatcctcctgtgtacttggttcagtaatgattagatgctgaattacacacaccctcacagtcaaggatgttcctctggcatcaggcatttggctcttcactcatgtaggttgtctttggggtgtctgtggttgatttttcacatcccgttgtgtgctgggcatagaggtcacactgggaacagagaaacagccaggatattgtgcgaggaacatgtacaccattggtggccacaaccttgacctcttccctgcacttcagtccttacctgtgaaatggaggcatggcgctacccacagggtgttgtgaggatgaaatgcaacccctaatataggaattctttgcacatgtagcacaaaaccccccataaagaagcaagaacaccttgtgttaaaatccagcttctgaaagtaactttgctaggataactcttttgtggtacagtgaaatgccataccactttggaaaagtgccctatggtgttggggcaactgctcctgaaataatgcccttcttctgtggtcctaggtgaggctccaggttgggctctatgctgtgtaccttctggactggctcagcgtttttgacaagcaacagtttctcattcttcgcctggaagatcatgcatccaacgtcaagtacaccatgcacaaggtcttccagtttctgaacctaggtatgagtgtggtgcttagactgacgggccaaagcatgagctccgtggacttgttctgggagtcctctggggcaaatgcagacctggtcagctgggtgggaatgggctgagctgggaggcctggggatgtccttcaggaggcctgttaagtaccatttattgagcactagctgtacataggtcattgtgcacagtatggtgagggattctctggagagaaggagatggtttcccttctgggagcttatggtctagtgaagggagaggaggaagccatagctcacctaactgaatgacaggtaggatgccgtggggaaggtcagcactgtcatgtaaggtatgtgctgatggtttgggatcccagctactgcacggatgaggaaggcttcatggaaggaaagggcctgagagctgagctttgtaggaccaacaggatgtcaccggggggctggagcagaggacttggggcttagaggagggaacagacagatcattgcatcatctccggtattcttggaaattccaggagtcagagccgtgtggctgagttttggctgctgatcatggatgctgggcccctggggcatgagcgcctgccctcagcctgtggataccagcccccccaggggcctgagagtcactttgtggtgacaggccacactgctgactatggtgatggctggcagaggcatgtgctggcggagcgagtgctgcccatgtggacggggcaccaagggatggcttgaaaggctgagcaggctcgaacaagccgccctccttcccagaacgcctcctgcagccctgactaatggtcttgcccgggaacttggttaattgagtatttctgaaaatatatctgcctgccactgggacttgggcctctttgatcatttgattttgtttctcctttttttggagtttgatgagttctttcccttccaaggcttagaatcatctttctttgatttgaccacatgttgactctgtcccattaatgagcttgtcttttgtccccaagatggatagtaaggccaattctgtgtttcatatggccctaggatgctgggacatgctttttctgtctatgggctaaggactttggccagatcccaagagcccccggtaaagaggcttgagcagtgatgggttacaccaagaagctgtggcccagagggcggggcgttggggtcgcagcccttgctgttctgtttcagggcctctcactccagagggcggggcgtgtgcgtgactgacagcccctcccggccttttccagggcctctcctcactccagagggcggggcgtggcggtgactgacaacctctgccagcctgttccagggcctcgcctcactccagagggcggggcgtgggggtgactgacagcccttgccggcaggcctcttctccctgatctccttgctgcagatggaggttcagccagtgggggctctgggcacaagtggcctcctcccagccctcctccctatggccacttcacagcaagacgcacagggtgaaactgtgcaggcccagggaccttggcatgagcagcctgaagtagaaacgatgatggcggaattccagagggctgctgagcaggaaaaccgaaacccgtgggctgtgctcggcaggccgcacgttcctccaaggacgggctgacacccatggagagcagcccaccaagggcaattggaagggaatccttgaggtcagccttagacgctgtatcatcattaaatgccagctgggctcccccgagggtgggcatcctgcacccgccgcagaatttcttcgcaatttcctgatggtgtttccaccttcctccctcagtgcttccaaaatggatccagccaaagaattttaatccctaaatatgttctcttaaaggaaactcctgtctgaatacgaagcatagctgggatttttgcaaagtcccttttacttcctgccatgcctcctgccttacgggactcgtcttcttttattctagggcccttaagtgagaagcaggaggctttgatgaccaagagccccgcatccaatgcacggcgtcccgaggaccggaacctggggcccatgtggcccatcacacagaagattctgcgggatttctacaggcccttcaacgctaggctggcgcaggtcctcgcggatgaggcgtttgcgtggaagacgacgtgagagctgaattgttgctgcacgtgctgggcccgccaatgccgtcatcatcaggattttacaaatctctttgcggggaactgtttcactcatggtatggaaaaccccaggactctgccactctaggcacacatgaattataaccattttggaatttccttcgtgatgttcgagagctcagcaatggacccctcacagagctcctctatccgaggccattggagaccccagtttctcaagaattcagctctgctctgagcgtcctggagcttggggatgcagccagctggcctgcactgggtgtggagagaacacctagggaaggcagcctggccctgcccgcctccgccttctggagagcctctgggttctgagtcagcaagccagaggtcatgccacaggcctggctggaacttacacttcacgttccctttttttccccctagagatggggtctcgccgtgttgcacagactgtctgtattcaatggctatcttcacaggtgtgatcataccacattcacttctgaaacactcttgttgcgatcgctaacctcactgggacagagaaccgcagtctttcgagaatggaggctcttcattttttttttctcctttactccaaactcagccctccagtttcttcagatgtaaaccctgttaacgtcactgtttccaaaaggaaaaaaataagtcagtttttggcagcaccttcatctttctgacctcctcctattctgtccttgtggacttatgtttaacatagaaaatgaatgcgtttaaaacaaaaccactttctgcatttaaccagtcctggctctctctctgctgcctcttcatacgttttctcaagaacttcagtttataattggaagagaaatttttgctgttaatgccagaatgagcaacctcaaggaattgaacacttcatggaaaatctaggtaattcaagccctcatcaggtttacaagatcatcagagaaacagaggattttaatttttagttctggccggctacaggctccatttctctgccttcccattggaaatagtttatttccacattctccactgcgtgtggtcaaagttcctcacccagcaagggactatagatactcgtgtcccaattccaaaacacaatgcacaagctgaacttgggctgaacgtggcgtgttgagatttggaatgaggtttctaagagccgtgttcttcatggaattttccaggccacttggcagcttggtttaccgatggatgggctagagatcttgtcgtttcttggaagtcacagggaagattgaagagaacgcttgagcatccttggcaacagcccaggtgggacctggatgaagctttgcactcaagtattgtcaagggaagcttcctgtgaaccaaagttctcaggccaaggtctcgcccaccaaagccagaaagtgcaagcacccgtctacccagctctaacttgtatgtgtgagacagaccaggcttcgggggtaggaggatctgcagttgttcagccgtctttctgctggtgttgtctttctgccatcagagaagggacacacagcccgttcgaaggtgtgcagagggctctgagcgccaggatggccagggctgtttttgctactgaaggagcgtgtgtcctgaactcccacttgcagggacagtccccaccttctctatagccggcactgggagcagccgccagcagggaaatctggcctgagcacaaggatgctttagggagagatcacttcagtgtgtgtgtatatttatttgcagtacagtgcgcgcgtgtgtgtgtgtgtacgcgcacgtgtgggtgagtgcgtcttctgagtgggttctgttcagttgctaatgaggctcctccgctctggacacaacccttttatagattaatttctctgccaattaacttgtcattttcagtacatattttactattccacaccaaccataattacaacaagggatttttcttatgcactcctatgcatgtgaataacatgtggtgtaattctgcttcttacagaagtattactgaaggtattatttccaatattatttggtttattatgcggatcttttttatatatgcagtcccatcccttctgtgccactcaatgccatccagacatggtttttccctccaggggcctttctccagagggcacttcggctgcctctgcttcctctcattcgaggcccggctcttgctgacagaataggttccgttctgggcggtggttctcgagcctgccattcaaaaccaaagcaaattggagcatttctcacaacatggtattgaagttcctttttgttctcaaaagttgtgaccgtgttaaattgtactcccttagtcctgtaaggtatgttaagtgaatcgcagttacgctgtacttttattaatatttaacataattaaagatggacccataagagtgacgcctgtggagcgcgtgctcttcctctgcagccaagctcttcctggtgcatgagtgaatcgcagtggtttagtgtcgcacctgctcgagttgtgcaggctctgtgtaaagaggagttacagctgtgctggctgctgagagacgaggtgtgattgtgcgagcaacaggcagaagaaaactcaagaccagagagaaaaggattcagatgttagcagggactccctgtgcgagtcctgttggggtgtgagtcagggtgggaggtctggcccagccacagtcaggcctagcgttgtcttcagaccttcaaatttgaaggttaagtgaccacaggcctcattccggtggcctgcctggcccctggcagctgtgagtttgagacccctggtgtctctggcacatgtccttattgctgagggcaagcccgcagaaggaggtgtggtgtgcactcaggtggggcagccaggacaaaagaccacaaacaacggaaactgattttctcagtctggaggccagagacccgagatcaaggtgctgcagggctggtttctctgggggtctctgtccttggcttgctgatggctgattctctctgtgtgttcatgtggccacacacacacacccctgctgcctcttcctctccttataaggacaccagtcggagtggatgaaggcgtgctctgacagcctcatcttaacctcatcatctctttaaacaactttatctgcaaatgcagtgacattctgaggtactcgagattgggacttcaacatacgaatttggggcacacttttcagcccatacagaggggacatctcaggcttagggctctgaaagctgggccatcctgagcacagcgtggaccatggtgggtcccccagttctgggcagaccttcctgggggagccttctccccagcaccacctcccacagtggtgtgttgaggtagggggcaggtgtgtccaggctggaaatagggaagaccccatcttttcctgcgagggtcaggaatggctttacccagcagggaatggaggacgggtgggagtcaggagcaggacggctggggtgcatctttgagggctgagggtatgacctccctccatttcagatttcctctgaaagcctctcccgtgaggccacccactccccaccgagaaaccagccctcgggaaggatcctgatgaggagtatgcctcttccccacaaaatgaccctatttgggaactgaagcaaaggctgtgctccgggtggaggaactccaaggatccctgagtgtggagacagggattatgtgggtgactattttcctgttactccagaaatctcaccctccaggcagctgtgctgcctatggtgaggtggatcccatggggactgataggaaaacatcactctgatgaatcgggttttcccagtacttcaccgggcaaggttccctgcagagcagcagagacagaataggtcccgtggggcagaagctgcatcggccggaacagctgtcggcctgggagctttgtgaatttatgttgctataaaggagtacctgaggctggaaatgtataaaggaaaaaaggcttgtttggctcacgattctgctggctaaggattgagcattgggtgaaagcctcaggctgcttcacgcctggcggaaggtgaagagggcgggctgcgcagaggtcacaggggagggcagggccgggggagggaggtgccaggctctttttaacaacctgcttttgcgggaacaaatagagcaacaactcactacccccaggatggcaccaagctattcttgcgagctctgcccccatgaccccaacactggggatcagatttcaacatgaggtttggggtacacacatccaaactacagcagctactataaatcaccccaaacttagtggctcaaagcaacagaagtttatgatcttacagtgctggaggccagaagtctgaagttggtctcactgggctaaattcaagtgatgagcaggactggttccttccaggggctcaaagggagtgttttcctaccttttccagctttgagaggctgcctgctctcatggctcctggttctttcctctgttgtcaaaagcatggcatcttcaagtctaactctctccctctgcttcagagatcacatggccttctctgaccctcatgctcctggtgtcgtaaggaccctctcgatgacaccgggcccaccagataatccgggatcatctccccatatctggatcacatctgcaaagcctcttttgccatagaagggagcatatttgtaggctctagggattatgacatggacatcttcaaaggcccgtattcggccaagcacaggagggtggtgtggagagctggccagtcagccaagcgtgggatggaggaggtaccccgtggctggttccctgtgctctactgtacagctcaggcaggtctgagtggggagggggctgccctcagcagaaggccgagcttctggatgcgtctattttgggacagcgcaccttcccgtccaggcaaggccctgtgactggggtagtggagtaggtgggacagggtgacacgaggggtcaggccacagacccacctcctcctcaattcacatcacagtgtttttcccgtggaaggtcacctggtttccaagagtcagccttgtcccccacaatggagacaggacaatttctccagctcttggtagaagtaatttttgagtgcttactagttatttacctttttactttttaaaaaattcttgtgaagttactttgtgagttttccaggatgtgtgtaaactacacacatcagccacctaggtagttttgagttgctttgaagttcagctgttgttgacttcaaaggcagcagcttatgaaagttggagaaatagttagaacattttccagtccctattcaggggttggtgacctccgtggcccccagcctcgtggctttgggctttggaaggctggtgtctggtctcactgatggctacaggctggactcacccccaccatctctgtcctcaccaaccctgtccccagccccctggctcatccccagtatcctctacaaacctgctcctactcgggtccagggcaggaggctgagcactgtgggccatcctgggagcctcaggctgcacaggttgctgaccttggactgtaagggctgagtacgaaggcagaaggtggggattctcaggcaatgcagcaggcctgcgagagactctggggaggagcaacagggctctctaaattgccacctgcaagtggctgcgtcctcctaccatggggcacccaggacccagctcaggcttgcacctgggttcttccttgttgaacctgtggcaaagcaaggaggagacttggtctactccctcctgggcagcctctgctgactgccctataggtgctgggcactgtgtctgggacacagagactgtgaaaggcctcctctcccacagtggagagctgccagcagcatgaggaggccgggttcatgcagggtccttggcaggcctgagggccagtggggatcctgggggctttctggggtgtaccctcagctctgcatgctttgaaaggcccctttaaagtcaggtcctggtcagatctagaagcgggcaagtctcagctgaggctgaaacctcggcctccctgagccttgtgacttgcccagggtcggaggcccaacgccccctgaggaattctcttcctggtacggcagagaaaggtgggggccagggaatcagggtggggaaatcccagctgcctctccctgcaccctggcccatctcccccaggtcatgagccatcccccttcgactgttttcccaccataagggactatgatttacatctaccaaactctgccaccgacaaggacagtgtgggaagagggtgagccctgagtggagccaggtgagctggattcaaagcccagttccgcagcagagagcctgggagagccatctcttaaccttgggtacaccacaggccctttctgcacccacaggtctgtcttgctcatgagtgggtctcagagtttacaaatatagactgaggatcagagaggctgcatgcgtgcctgaggtcacacagctcagatccccagaaagagagcagaatggcagctcagacattccgagtcagtgcttttaaccatagtgctgcattatataccctcagcaccagccccaggcttccatcctcagtagcctgtctacatttcaagggttagttctccttcccctccatttcaaatgcccccctttcaagttccctcagggaaggccagtggtttttggggtcacctgggccagggttttctgcagctcaacccatcaggggtctaggtgatgactgggatttctagggggaaacaagggaaataaacatggctttttctgccaaaaggctctctcagccgagacttgctggcacggatattgcccctgccctgggctggctggcgtgagttgtctgcgcctccctgaaggcagacttcaggggctagctgtgatgggctagctgcggtgaggagtcccctgagccctgagtcacatcagaagcacattgctccaccccagggctcggccttgcccagggcctcaaaggcaccaaacgtatacacctgagctagaaagtgtaaaaaagccaaaatttaattttctcagcaaatattttctgaacatctactatgcacgagtcattgggccaggcattgtggtgagggtgggacattgttcatttgctcattcattgattccttcactggttcttccaacaaatattgagggatcgccagccatgtccttggtattagaggcacctgggagagcagagctggtccctgcctgcatgcagtgcagcagacagattttgatcagaaacagacaagacattgatcacagcattgcctgaagcatttcagaactgcaacaggcatgaggggcgatactggggacagtgacatatttctggtgagataccctcattcctccccagctactccactctatgacctccccatctgcctcagagaccaagccccaagaggaggctgggctggaactgaacccccagctttccccaggccacacgaagaccactcccagaatgtttcaggcctaccagcgcctctacctacgaggtcacccccaaggctgccatgccctgatcctcaggaagccactgtaccttgcattgggtcctatgtgtcccatggcccctcatccattctcaaaatgcctcctccactttcatgctctggctcaagatgactgaagtgtttccataaagggccagatggtaaataatattagactttgtgggcccaagaggaaaaacagggatattaggtactaatgtaacacagagaaaagaggttccacaaatatttagagatggaattcaaaatacaatagttgagtacaattttttggtaatacagctctgcttacgagaagcaaggggttcttttgggagtgggtaacatgctgcttcattgagggtcaagttgagtgcaccctgtcagaccctctgcagatgctcgtctggagatgccattcctaatccaatctcctggccctgttgactttgttggcagctcctcctgaaactctcacttggtctccagaacaacggactcctcgctggtcctcatcctgcctccatggctgcacctgctcttctttctggccatgaatgtcggggtgcccagcggctcagtccttagccctctcccataactgttcttatccagtccgtggcctcagacgccatctctatgccgatgactcctagacctcagccctgagcgcaggctggtgcacccactgcgtgacaggtggcgcccccagcattaatgactcagagctcttgggtctgtctctccacctaagccgcctccccagcagggttccatcttcagtcgcagtgaccagcccatgcaggccatgtcactgagctctacccgggcgctgctcgcccacacccaccctggaacccatcttgccggccgtcctgctcctgccatctcttctgcgggaaggctctgcccccagcttcctccttcaggctgacagccacttcccagtcaacctgaccaccctgaccaaacagccaccccgccccttcccaagccactctctcaccgtcctgtcttattattttgtgtaagtgatcagggaagggaccatagtgaggcaaaggcaccggcccggccagggtcagggaagggaccatagtgaggcaaaggtgctggtctggccagggccagtgaagggaccatagtgaggcaaaggtgctggtctggccagggccagggaagggaccatagtaaggtgatctcacttggtcatagtaaggagaccaatggtggatcctgcctcataggatccaccattctcccggctctgccccctcatcttgaccactcttgtattagtttggttgactattttctgtattttatgatcctttgacatcttgctggcctgggaaggactgccctctcgggactagctaacccctagatatagaggcacttggagcacaccttttgtgtgcaaaacggccaatcccagcccaccccgaccatctcccttcctgagcacttgcagtgggcaatgcagctccccagtcgccccgcgggccaggggccagaaacttggaagcccagacactctgagccccataaaattattcaaactcagctctagccctgcatagcccagttgctgtttgtccatttcttcctgtgaaaaccacagcaaaggctctggctcaccatttccccagggctctctctgcctcctcccctcggtgcttcccagtggccccacatagcccggtgtgtctcttcctcttgggaactgtgagtaacaaaccattgtgccaaaggcaatcttttttttttttttttttttttttttttttttgagacagggtttcactccgatgcccaggctggagtgcagtggtaccatctcggctcactgcagcctcaacctccagggctcaggtgatcctcccaccttagcctcctgagtagctgggactaaaggcacctgctatcatgcccagctaactttgtgtatttttttgtagagacagggtttcgctatgttgcctaggatggtcttgaactcctgggctcaagcaatccacccacctcagttcctcaaagtgctgggattataggcatgagccactgagcccggctaaagacaatcttctgagctgttggtctcactttacccgaataacagtgaaacctatgcttcaacaccccccacccccgcaccactcccgcatggtggtgagagccggggccaaggccctcctggcacctccactgtcacttttcccctgcagtccttcaaaccatgtcactctcttccttgaaaccctccccaaccccccaacacacctaggataaaaggccaagacctgctcatggccctcgaggccctccctgggttctaccctgccctgctgacctctgagacctcagctgcccgcactcacctcagccctggctatgctgacctcaccgccatgctcagcacaccaagcccttccctgtactggcctgtgaccctggggtgccctgcctggcacacccttccctgaccctggccaggctggcaccttcgcctcactacggtcccttcgctggccctggccagaccagcacctttgcctcactacggtcccttccctgaccctggccaggccggcaccttcgcctcactacggtcccttccctgaccctggccaggccagtgccttcgcctcactacggtcccttccctgaccctggccaggctggcaccttcgcctcactacggtcccttccctgaccctggccaggccggcaccttcgcctcactacggtcccttccctgaccctggccaggccagtgccttcgcctcactacggtcccttccctgaccacttacacaaaataatacctctcctgcatggccagcctccctgcttgatttgctcacagctgtcacctgagactggaccatctgtgtgtctgctgctgcttcagcagccctctgcccatcagggacctccgctccttgaggtgggaactctgttcatggctgcagcctcagagcctgaatcagtgactgcacataatactcactcaacaaacttagatggggcaaaggcatgtgtgatgatgctgtagagcaggcaatcccccacccctcgggcatgggccagtagcagtcctgggctacacagcgggaggtgagaagcaaagcttcatctctatttacagctgctccccatcgctcacattaccacctgagctccacctcctagtggtaacgttggattctcatagcagctccaaccctattgtgaactgtgcatgtgagggatctaggtggcacattccttacgagaatctaagatctgttgctgtctcccatcacccccagatgggaccacctagttgcaggaaaacaaattcagggctcccactgattctacatgatggtgagttgtagaattatttcattacgtatttcagtatagtaataatagaaatgaagtgcacaatacatgtaatgagcttgaatcatcccaaaccatcccccccaccaaactgtggaaaaactgtcttccatgtaactggtccctggtgccaaaaagttggggcctgccgctctggagtgtgaagcagggaaagaggacctcaccgtaagggccaggctcactttcctaaggaaggaacagggagagcctagaagaatgcaggccttgtgcaaatgtcagaacctccagcagaggagaggtctgcagggtgcatgggggctgtgacccagatggcatcaggaaagaggtggcgttaagctgagccctaaagactggcaggatctagaaaggtgggcaggcatgccgagaggaggggctggggtgagcaggggcagggagcagggaaggccaaaagagcagggaaggtctcagtgcctccggaaaggagtatacgaacattctgggctttggagtcagggagacctggactacaatcctggctctgccattgtcctctgtgtgaccttaggcagagggtttgatgctactgagcctctgttttcttatctgcagaatgggtatgcactcagactcaggcccttatggcgataagggttcacgcatgtaataccctccacatggcatctggaccctggaggtgggggcaggtcacctcagcaatggtcctcaggcacgattgttgtagcagtaggaggtgaagccacccaggtaagtgggcacaaggtcaaagagggtttgggtctcagggtaaatgcctttggttgaactagtggtgtattgagcttcccacactgacattttctgagcagaggaattattggttagcgcagggatttaggtcattaatttggagcaggtagaagtgcctggaaatggaaggactaaggctgaggcttctatggtccaagtgagtgatcacaggggctgggagtaggaagcacggctgaagggccatctcaaaggcactgtaccaatgggatggtgacatcactactgacggcacccacagagctggggtatatgtatgcttatgtgtaacttcccattttacagaaaaggaagctggggctcagggaggttaggtgactgctccaaggtcacacacttagtactggacccagtgttggaacccaccaaatctgacccatcttgtgcttgtcactaactgaaggatgtggcaggcaatggaggcaaggtcaaaggcaaagtcaagccccaaatggtcaaagacaaggattagacttggagctggtgtccagcctgagggtggaggggtgagggacatttaccgtagcaggggaaggctgggtcgagtcaacgttcttgcaacatccgtaattgcagcgttagctgggcaagttagatgggtggggaagtcctacttaaccacatagacatttcttaaacattttatttttacttcaaatatgtgaagtacagcacatct

SEQ ID NO: 1078 - DNA, 4726 bp, Homo sapiens
tcctcccagcgctcggggagtcaggttgacgcgccctggatgcggggctagaggctcggggctgggcgcgctcccgcggagccggagccgcagaggctcccgggctggactcaggcttctcaggaaatctggcattttttaaagtttgcgccccacaaagaggaaatattccaaaggtactcaggatgtaaaaggggagatcttcacagatgcctccgtggatggcatggcaatccatccatcaatgagaagaccatgatttcttttaattttctgtgtgtttccacattccccagtgagaattcttccacctttttttgtgccatgggaaaaacctgaagggcaggcagagctgctcccgaacttgtgaccttctctgaggttgcagcggctcttgtagaacatgactctgggacatcacttccttttgttttctttcggagctgaaccaaagaatgtgcaccctctttctctagtgctgtggtgtctgcttatttttgtatttgtgctttccatccatcttctgtgatcacaaggcattcttaaggttttctagcacgacttgcggacatccagactcgtggggggcccacccatggctcggtaagccagcagcccagggcactggcactaccatgaggcactgcattaattgctgcatacagctgttacccgacggcgcacacaagcagcaggtcaactgccaagggggcccccatcacggtcaccaggcgtgccccacgtgcaaaggagaaaacaaaattctgtttcgtgtggacagtaagcagatgaacttgcttgctgttctcgaagtgaggactgaagggaacgaaaactggggtgggtttttgcgcttcaaaaaggggaagcgatgtagcctcgtttttggactgataataatgaccttggtaatggcttcttacatcctttctggggcccaccaagagcttctgatctcatcacctttccattacggaggcttccccagcaaccccagcttgatggacagcgaaaacccaagtgacacaaaggagcatcaccaccaatcctctgtaaataatatttcatacatgaaggactatccaagcattaaattaattatcaacagcatcacaactaggattgagttcacgaccagacagctcccagacttagaagaccttaagaagcagatgttttcagtcatccccaacaaattccttccaaacagtaagagcccctgttggtacgaggagttctcggggcagaacaccaccgacccctacctcaccaactcctacgtgctctactccaagcgcttccgctccaccttcgacgccctgcgcaaggccttctggggccacctggcgcacgcgcacgggaagcacttccgcctgcgctgcctgccgcacttctacatcatagggcagcccaagtgcgggaccacagacctctatgaccgcctgcggctgcaccctgaggtcaagttctccgccatcaaggagccacactggtggacccggaagcgctttggaatcgtccgcctaagagatgggctgcgagaccgctatcccgtggaagattatctggacctctttgacctggccgcacaccagatccatcaaggactgcaggccagctctgcaaaggagcagagcaagatgaatacaatcattatcggtaaggcttctccaccgtttctgacgcaggacttcatccacgcctttcagccaaatgccagactgattgtcatgctcagggaccctgtggagaggttgtactcagactatctctactttgcaagttcgaataaatccgcggacgacttccatgagaaagtgacagaagcactgcagctgtttgaaaattgcatgcttgattattcactgcgcgcctgcgtctacaacaacaccctcaacaacgccatgcctgtgaggctccaggttgggctctatgctgtgtaccttctggactggctcagcgtttttgacaagcaacagtttctcattcttcgcctggaagatcatgcatccaacgtcaagtacaccatgcacaaggtcttccagtttctgaacctagggcccttaagtgagaagcaggaggctttgatgaccaagagccccgcatccaatgcacggcgtcccgaggaccggaacctggggcccatgtggcccatcacacagaagattctgcgggatttctacaggcccttcaacgctaggctggcgcaggtcctcgcggatgaggcgtttgcgtggaagacgacgtgagagctgaattgttgctgcacgtgctgggcccgccaatgccgtcatcatcaggattttacaaatctctttgcggggaactgtttcactcatggtatggaaaaccccaggactctgccactctaggcacacatgaattataaccattttggaatttccttcgtgatgttcgagagctcagcaatggacccctcacagagctcctctatccgaggccattggagaccccagtttctcaagaattcagctctgctctgagcgtcctggagcttggggatgcagccagctggcctgcactgggtgtggagagaacacctagggaaggcagcctggccctgcccgcctccgccttctggagagcctctgggttctgagtcagcaagccagaggtcatgccacaggcctggctggaacttacacttcacgttccctttttttccccctagagatggggtctcgccgtgttgcacagactgtctgtattcaatggctatcttcacaggtgtgatcataccacattcacttctgaaacactcttgttgcgatcgctaacctcactgggacagagaaccgcagtctttcgagaatggaggctcttcattttttttttctcctttactccaaactcagccctccagtttcttcagatgtaaaccctgttaacgtcactgtttccaaaaggaaaaaaataagtcagtttttggcagcaccttcatctttctgacctcctcctattctgtccttgtggacttatgtttaacatagaaaatgaatgcgtttaaaacaaaaccactttctgcatttaaccagtcctggctctctctctgctgcctcttcatacgttttctcaagaacttcagtttataattggaagagaaatttttgctgttaatgccagaatgagcaacctcaaggaattgaacacttcatggaaaatctaggtaattcaagccctcatcaggtttacaagatcatcagagaaacagaggattttaatttttagttctggccggctacaggctccatttctctgccttcccattggaaatagtttatttccacattctccactgcgtgtggtcaaagttcctcacccagcaagggactatagatactcgtgtcccaattccaaaacacaatgcacaagctgaacttgggctgaacgtggcgtgttgagatttggaatgaggtttctaagagccgtgttcttcatggaattttccaggccacttggcagcttggtttaccgatggatgggctagagatcttgtcgtttcttggaagtcacagggaagattgaagagaacgcttgagcatccttggcaacagcccaggtgggacctggatgaagctttgcactcaagtattgtcaagggaagcttcctgtgaaccaaagttctcaggccaaggtctcgcccaccaaagccagaaagtgcaagcacccgtctacccagctctaacttgtatgtgtgagacagaccaggcttcgggggtaggaggatctgcagttgttcagccgtctttctgctggtgttgtctttctgccatcagagaagggacacacagcccgttcgaaggtgtgcagagggctctgagcgccaggatggccagggctgtttttgctactgaaggagcgtgtgtcctgaactcccacttgcagggacagtccccaccttctctatagccggcactgggagcagccgccagcagggaaatctggcctgagcacaaggatgctttagggagagatcacttcagtgtgtgtgtatatttatttgcagtacagtgcgcgcgtgtgtgtgtgtgtacgcgcacgtgtgggtgagtgcgtcttctgagtgggttctgttcagttgctaatgaggctcctccgctctggacacaacccttttatagattaatttctctgccaattaacttgtcattttcagtacatattttactattccacaccaaccataattacaacaagggatttttcttatgcactcctatgcatgtgaataacatgtggtgtaattctgcttcttacagaagtattactgaaggtattatttccaatattatttggtttattatgcggatcttttttatatatgcagtcccatcccttctgtgccactcaatgccatccagacatggtttttccctccaggggcctttctccagagggcacttcggctgcctctgcttcctctcattcgaggcccggctcttgctgacagaataggttccgttctgggcggtggttctcgagcctgccattcaaaaccaaagcaaattggagcatttctcacaacatggtattgaagttcctttttgttctcaaaagttgtgaccgtgttaaattgtactcccttagtcctgtaaggtatgttaagtgaatcgcagttacgctgtacttttattaatatttaacataattaaagatggacccataagagtgacgcctgtggagcgcgtgctcttcctctgcagcc

SEQ ID NO: 1079 - protein, 525 aa, Homo sapiens
MRHCINCCIQLLPDGAHKQQVNCQGGPHHGHQACPTCKGENKILFRVDSKQMNLLAVLEVRTEGNENWGGFLRFKKGKRCSLVFGLIIMTLVMASYILSGAHQELLISSPFHYGGFPSNPSLMDSENPSDTKEHHHQSSVNNISYMKDYPSIKLIINSITTRIEFTTRQLPDLEDLKKQMFSVIPNKFLPNSKSPCWYEEFSGQNTTDPYLTNSYVKKRFRSTFDALRKAFWGHLAHAHGKHFRLRCLPHFYIIGQPKCGTTDLYDRLRLHPEVKFSAIKEPHWWTRKRFGIVRLRDGLRDRYPVEDYLDLFDLAAHQIHQGLQASSAKEQSKMNTIIIGKDPFLTQDFIHAFQPNARLIVMLRDPVERKDYLYFASSNKSADDFHEKVTEALQLFENCMLDYSLRACVYNNTLNNAMPVRLQVGAVYLLDWLSVFDKQQFLILRLEDHNVKYTMHKVFQFLNLGPLSEKQEALMTKSPNARRPEDRNLGPMWPITQKILRDFYRPFNARLAQVLADEAFAWKTT

SEQ ID NO: 1080 - DNA, 2350 bp, Homo sapiens
cgcgcgtcgtttggcggtaggggacggggattccccccagccttgcgctccgcccccacacccctatcgcactttggggaagtttccaggcgcggcccggggcaggaaatctggcattttttaaagtttgcgccccacaaagaggaaatattccaaaggtactcaggatgtaaaaggggagatcttcacagatgcctccgtggatggcatggcaatccatccatcaatgagaagaccatgatttcttttaattttctgtgtgtttccacattccccagtgagaattcttccacctttttttgtgccatgggaaaaacctgaagggcaggcagagctgctcccgaacttgtgaccttctctgaggttgcagcggctcttgtagaacatgactctgggacatcacttccttttgttttctttcggagctgaaccaaagaatgtgcaccctctttctctagtgctgtggtgtctgcttatttttgtatttgtgctttccatccatcttctgtgatcacaaggcattcttaaggttttctagcacgacttgcggacatccagactcgtggggggcccacccatggctcggtaagccagcagcccagggcactggcactaccatgaggcactgcattaattgctgcatacagctgttacccgacggcgcacacaagcagcaggtcaactgccaagggggcccccatcacggtcaccaggcgtgccccacgtgcaaaggagaaaacaaaattctgtttcgtgtggacagtaagcagatgaacttgcttgctgttctcgaagtgaggactgaagggaacgaaaactggggtgggtttttgcgcttcaaaaaggggaagcgatgtagcctcgtttttggactgataataatgaccttggtaatggcttcttacatcctttctggggcccaccaagagcttctgatctcatcacctttccattacggaggcttccccagcaaccccagcttgatggacagcgaaaacccaagtgacacaaaggagcatcaccaccaatcctctgtaaataatatttcatacatgaaggactatccaagcattaaattaattatcaacagcatcacaactaggattgagttcacgaccagacagctcccagacttagaagaccttaagaagcaggagttgcatatgttttcagtcatccccaacaaattccttccaaacagtaagagcccctgttggtacgaggagttctcggggcagaacaccaccgacccctacctcaccaactcctacgtgctctactccaagcgcttccgctccaccttcgacgccctgcgcaaggccttctggggccacctggcgcacgcgcacgggaagcacttccgcctgcgctgcctgccgcacttctacatcatagggcagcccaagtgcgggaccacagacctctatgaccgcctgcggctgcaccctgaggtcaagttctccgccatcaaggagccacactggtggacccggaagcgctttggaatcgtccgcctaagagatgggctgcgagaccgctatcccgtggaagattatctggacctctttgacctggccgcacaccagatccatcaaggactgcaggccagctctgcaaaggagcagagcaagatgaatacaatcattatcggcgagccaccgtttctgacgcaggacttcatccacgcctttcagccaaatgccagactgattgtcatgctcagggaccctgtggagaggttgtactcagactatctctactttgcaagttcgaataaatccgcggacgacttccatgagaaagtgacagaagcactgcagctgtttgaaaattgcatgcttgattattcactgcgcgcctgcgtctacaacaacaccctcaacaacgccatgcctgtgtgtacccccccccccgtaccccccgagctggcccctggcagaaggagctggtttgttgttattatgcaagcggcattgtgggtttgcgtttcagcataggaacagagagaagcgttttaatgtgcaaatgctgttccccattattcatggatgtaaaagctgaaaactgatgggctcttggtctggctcctgccttcctccctgctggtcacctgccacctccccctcctccctcagcaggaggatgagggtgcctttaggaagattaccatttagcaagacacccagcaattagaatcggcagacacgaggacacccaactctcaaattgtcttaagagcattctcttgagcggtggattgttttgttggtttaaaaaactacccatcaatgattttcaatgcttctttgacagagtctcaattgaaaaacattttctgttgattcctcaa

SEQ ID NO: 1081 - protein, 455 aa, Homo sapiens
MRHCINCCIQLLPDGAHKQQVNCQGGPHHGHQACPTCKGENKILFRVDSKQMNLLAVLEVRTEGNENWGGFLRFKKGKRCSLVFGLIIMTLVMASYILSGAHQELLISSPFHYGGFPSNPSLMDSENPSDTKEHHHQSSVNNISYMKDYPSIKLIINSITTRIEFTTRQLPDLEDLKKQELHMFSVIPNKFLPNSKSPCWYEEFSGQNTTDPYLTNSYVKKRFRSTFDALRKAFWGHLAHAHGKHFRLRCLPHFYIIGQPKCGTTDLYDRLRLHPEVKFSAIKEPHWWTRKRFGIVRLRDGLRDRYPVEDYLDLFDLAAHQIHQGLQASSAKEQSKMNTIIIGEPPFLTQDFIHAFQPNARLIVMLRDPVERKDYLYFASSNKSADDFHEKVTEALQLFENCMLDYSLRACVYNNTLNNAMPVCTPPPVPPELAPGRRSWFVVIMQAALWVCVSA

SEQ ID NO: 1082 - DNA, 4735 bp, Homo sapiens
tcctcccagcgctcggggagtcaggttgacgcgccctggatgcggggctagaggctcggggctgggcgcgctcccgcggagccggagccgcagaggctcccgggctggactcaggcttctcaggaaatctggcattttttaaagtttgcgccccacaaagaggaaatattccaaaggtactcaggatgtaaaaggggagatcttcacagatgcctccgtggatggcatggcaatccatccatcaatgagaagaccatgatttcttttaattttctgtgtgtttccacattccccagtgagaattcttccacctttttttgtgccatgggaaaaacctgaagggcaggcagagctgctcccgaacttgtgaccttctctgaggttgcagcggctcttgtagaacatgactctgggacatcacttccttttgttttctttcggagctgaaccaaagaatgtgcaccctctttctctagtgctgtggtgtctgcttatttttgtatttgtgctttccatccatcttctgtgatcacaaggcattcttaaggttttctagcacgacttgcggacatccagactcgtggggggcccacccatggctcggtaagccagcagcccagggcactggcactaccatgaggcactgcattaattgctgcatacagctgttacccgacggcgcacacaagcagcaggtcaactgccaagggggcccccatcacggtcaccaggcgtgccccacgtgcaaaggagaaaacaaaattctgtttcgtgtggacagtaagcagatgaacttgcttgctgttctcgaagtgaggactgaagggaacgaaaactggggtgggtttttgcgcttcaaaaaggggaagcgatgtagcctcgtttttggactgataataatgaccttggtaatggcttcttacatcctttctggggcccaccaagagcttctgatctcatcacctttccattacggaggcttccccagcaaccccagcttgatggacagcgaaaacccaagtgacacaaaggagcatcaccaccaatcctctgtaaataatatttcatacatgaaggactatccaagcattaaattaattatcaacagcatcacaactaggattgagttcacgaccagacagctcccagacttagaagaccttaagaagcaggagttgcatatgttttcagtcatccccaacaaattccttccaaacagtaagagcccctgttggtacgaggagttctcggggcagaacaccaccgacccctacctcaccaactcctacgtgctctactccaagcgcttccgctccaccttcgacgccctgcgcaaggccttctggggccacctggcgcacgcgcacgggaagcacttccgcctgcgctgcctgccgcacttctacatcatagggcagcccaagtgcgggaccacagacctctatgaccgcctgcggctgcaccctgaggtcaagttctccgccatcaaggagccacactggtggacccggaagcgctttggaatcgtccgcctaagagatgggctgcgagaccgctatcccgtggaagattatctggacctctttgacctggccgcacaccagatccatcaaggactgcaggccagctctgcaaaggagcagagcaagatgaatacaatcattatcggtaaggcttctccaccgtttctgacgcaggacttcatccacgcctttcagccaaatgccagactgattgtcatgctcagggaccctgtggagaggttgtactcagactatctctactttgcaagttcgaataaatccgcggacgacttccatgagaaagtgacagaagcactgcagctgtttgaaaattgcatgcttgattattcactgcgcgcctgcgtctacaacaacaccctcaacaacgccatgcctgtgaggctccaggttgggctctatgctgtgtaccttctggactggctcagcgtttttgacaagcaacagtttctcattcttcgcctggaagatcatgcatccaacgtcaagtacaccatgcacaaggtcttccagtttctgaacctagggcccttaagtgagaagcaggaggctttgatgaccaagagccccgcatccaatgcacggcgtcccgaggaccggaacctggggcccatgtggcccatcacacagaagattctgcgggatttctacaggcccttcaacgctaggctggcgcaggtcctcgcggatgaggcgtttgcgtggaagacgacgtgagagctgaattgttgctgcacgtgctgggcccgccaatgccgtcatcatcaggattttacaaatctctttgcggggaactgtttcactcatggtatggaaaaccccaggactctgccactctaggcacacatgaattataaccattttggaatttccttcgtgatgttcgagagctcagcaatggacccctcacagagctcctctatccgaggccattggagaccccagtttctcaagaattcagctctgctctgagcgtcctggagcttggggatgcagccagctggcctgcactgggtgtggagagaacacctagggaaggcagcctggccctgcccgcctccgccttctggagagcctctgggttctgagtcagcaagccagaggtcatgccacaggcctggctggaacttacacttcacgttccctttttttccccctagagatggggtctcgccgtgttgcacagactgtctgtattcaatggctatcttcacaggtgtgatcataccacattcacttctgaaacactcttgttgcgatcgctaacctcactgggacagagaaccgcagtctttcgagaatggaggctcttcattttttttttctcctttactccaaactcagccctccagtttcttcagatgtaaaccctgttaacgtcactgtttccaaaaggaaaaaaataagtcagtttttggcagcaccttcatctttctgacctcctcctattctgtccttgtggacttatgtttaacatagaaaatgaatgcgtttaaaacaaaaccactttctgcatttaaccagtcctggctctctctctgctgcctcttcatacgttttctcaagaacttcagtttataattggaagagaaatttttgctgttaatgccagaatgagcaacctcaaggaattgaacacttcatggaaaatctaggtaattcaagccctcatcaggtttacaagatcatcagagaaacagaggattttaatttttagttctggccggctacaggctccatttctctgccttcccattggaaatagtttatttccacattctccactgcgtgtggtcaaagttcctcacccagcaagggactatagatactcgtgtcccaattccaaaacacaatgcacaagctgaacttgggctgaacgtggcgtgttgagatttggaatgaggtttctaagagccgtgttcttcatggaattttccaggccacttggcagcttggtttaccgatggatgggctagagatcttgtcgtttcttggaagtcacagggaagattgaagagaacgcttgagcatccttggcaacagcccaggtgggacctggatgaagctttgcactcaagtattgtcaagggaagcttcctgtgaaccaaagttctcaggccaaggtctcgcccaccaaagccagaaagtgcaagcacccgtctacccagctctaacttgtatgtgtgagacagaccaggcttcgggggtaggaggatctgcagttgttcagccgtctttctgctggtgttgtctttctgccatcagagaagggacacacagcccgttcgaaggtgtgcagagggctctgagcgccaggatggccagggctgtttttgctactgaaggagcgtgtgtcctgaactcccacttgcagggacagtccccaccttctctatagccggcactgggagcagccgccagcagggaaatctggcctgagcacaaggatgctttagggagagatcacttcagtgtgtgtgtatatttatttgcagtacagtgcgcgcgtgtgtgtgtgtgtacgcgcacgtgtgggtgagtgcgtcttctgagtgggttctgttcagttgctaatgaggctcctccgctctggacacaacccttttatagattaatttctctgccaattaacttgtcattttcagtacatattttactattccacaccaaccataattacaacaagggatttttcttatgcactcctatgcatgtgaataacatgtggtgtaattctgcttcttacagaagtattactgaaggtattatttccaatattatttggtttattatgcggatcttttttatatatgcagtcccatcccttctgtgccactcaatgccatccagacatggtttttccctccaggggcctttctccagagggcacttcggctgcctctgcttcctctcattcgaggcccggctcttgctgacagaataggttccgttctgggcggtggttctcgagcctgccattcaaaaccaaagcaaattggagcatttctcacaacatggtattgaagttcctttttgttctcaaaagttgtgaccgtgttaaattgtactcccttagtcctgtaaggtatgttaagtgaatcgcagttacgctgtacttttattaatatttaacataattaaagatggacccataagagtgacgcctgtggagcgcgtgctcttcctctgcagcc

SEQ ID NO: 1083 - protein, 528 aa, Homo sapiens
MRHCINCCIQLLPDGAHKQQVNCQGGPHHGHQACPTCKGENKILFRVDSKQMNLLAVLEVRTEGNENWGGFLRFKKGKRCSLVFGLIIMTLVMASYILSGAHQELLISSPFHYGGFPSNPSLMDSENPSDTKEHHHQSSVNNISYMKDYPSIKLIINSITTRIEFTTRQLPDLEDLKKQELHMFSVIPNKFLPNSKSPCWYEEFSGQNTTDPYLTNSYVKKRFRSTFDALRKAFWGHLAHAHGKHFRLRCLPHFYIIGQPKCGTTDLYDRLRLHPEVKFSAIKEPHWWTRKRFGIVRLRDGLRDRYPVEDYLDLFDLAAHQIHQGLQASSAKEQSKMNTIIIGKDPFLTQDFIHAFQPNARLIVMLRDPVERKDYLYFASSNKSADDFHEKVTEALQLFENCMLDYSLRACVYNNTLNNAMPVRLQVGAVYLLDWLSVFDKQQFLILRLEDHNVKYTMHKVFQFLNLGPLSEKQEALMTKSPNARRPEDRNLGPMWPITQKILRDFYRPFNARLAQVLADEAFAWKTT

SEQ ID NO: 1084 - DNA, 4718 bp, Homo sapiens
ccgcgtctcgggaggcggcgtgactcgggagttgccggcgcttcccggcggtggcggcgtctctggccggccttggtgcggcgagccgagcgaggcagctctgagccgcgcggaaatctggcattttttaaagtttgcgccccacaaagaggaaatattccaaaggtactcaggatgtaaaaggggagatcttcacagatgcctccgtggatggcatggcaatccatccatcaatgagaagaccatgatttcttttaattttctgtgtgtttccacattccccagtgagaattcttccacctttttttgtgccatgggaaaaacctgaagggcaggcagagctgctcccgaacttgtgaccttctctgaggttgcagcggctcttgtagaacatgactctgggacatcacttccttttgttttctttcggagctgaaccaaagaatgtgcaccctctttctctagtgctgtggtgtctgcttatttttgtatttgtgctttccatccatcttctgtgatcacaaggcattcttaaggttttctagcacgacttgcggacatccagactcgtggggggcccacccatggctcggtaagccagcagcccagggcactggcactaccatgaggcactgcattaattgctgcatacagctgttacccgacggcgcacacaagcagcaggtcaactgccaagggggcccccatcacggtcaccaggcgtgccccacgtgcaaaggagaaaacaaaattctgtttcgtgtggacagtaagcagatgaacttgcttgctgttctcgaagtgaggactgaagggaacgaaaactggggtgggtttttgcgcttcaaaaaggggaagcgatgtagcctcgtttttggactgataataatgaccttggtaatggcttcttacatcctttctggggcccaccaagagcttctgatctcatcacctttccattacggaggcttccccagcaaccccagcttgatggacagcgaaaacccaagtgacacaaaggagcatcaccaccaatcctctgtaaataatatttcatacatgaaggactatccaagcattaaattaattatcaacagcatcacaactaggattgagttcacgaccagacagctcccagacttagaagaccttaagaagcaggagttgcatatgttttcagtcatccccaacaaattccttccaaacagtaagagcccctgttggtacgaggagttctcggggcagaacaccaccgacccctacctcaccaactcctacgtgctctactccaagcgcttccgctccaccttcgacgccctgcgcaaggccttctggggccacctggcgcacgcgcacgggaagcacttccgcctgcgctgcctgccgcacttctacatcatagggcagcccaagtgcgggaccacagacctctatgaccgcctgcggctgcaccctgaggtcaagttctccgccatcaaggagccacactggtggacccggaagcgctttggaatcgtccgcctaagagatgggctgcgagaccgctatcccgtggaagattatctggacctctttgacctggccgcacaccagatccatcaaggactgcaggccagctctgcaaaggagcagagcaagatgaatacaatcattatcggcgagccaccgtttctgacgcaggacttcatccacgcctttcagccaaatgccagactgattgtcatgctcagggaccctgtggagaggttgtactcagactatctctactttgcaagttcgaataaatccgcggacgacttccatgagaaagtgacagaagcactgcagctgtttgaaaattgcatgcttgattattcactgcgcgcctgcgtctacaacaacaccctcaacaacgccatgcctgtgaggctccaggttgggctctatgctgtgtaccttctggactggctcagcgtttttgacaagcaacagtttctcattcttcgcctggaagatcatgcatccaacgtcaagtacaccatgcacaaggtcttccagtttctgaacctagggcccttaagtgagaagcaggaggctttgatgaccaagagccccgcatccaatgcacggcgtcccgaggaccggaacctggggcccatgtggcccatcacacagaagattctgcgggatttctacaggcccttcaacgctaggctggcgcaggtcctcgcggatgaggcgtttgcgtggaagacgacgtgagagctgaattgttgctgcacgtgctgggcccgccaatgccgtcatcatcaggattttacaaatctctttgcggggaactgtttcactcatggtatggaaaaccccaggactctgccactctaggcacacatgaattataaccattttggaatttccttcgtgatgttcgagagctcagcaatggacccctcacagagctcctctatccgaggccattggagaccccagtttctcaagaattcagctctgctctgagcgtcctggagcttggggatgcagccagctggcctgcactgggtgtggagagaacacctagggaaggcagcctggccctgcccgcctccgccttctggagagcctctgggttctgagtcagcaagccagaggtcatgccacaggcctggctggaacttacacttcacgttccctttttttccccctagagatggggtctcgccgtgttgcacagactgtctgtattcaatggctatcttcacaggtgtgatcataccacattcacttctgaaacactcttgttgcgatcgctaacctcactgggacagagaaccgcagtctttcgagaatggaggctcttcattttttttttctcctttactccaaactcagccctccagtttcttcagatgtaaaccctgttaacgtcactgtttccaaaaggaaaaaaataagtcagtttttggcagcaccttcatctttctgacctcctcctattctgtccttgtggacttatgtttaacatagaaaatgaatgcgtttaaaacaaaaccactttctgcatttaaccagtcctggctctctctctgctgcctcttcatacgttttctcaagaacttcagtttataattggaagagaaatttttgctgttaatgccagaatgagcaacctcaaggaattgaacacttcatggaaaatctaggtaattcaagccctcatcaggtttacaagatcatcagagaaacagaggattttaatttttagttctggccggctacaggctccatttctctgccttcccattggaaatagtttatttccacattctccactgcgtgtggtcaaagttcctcacccagcaagggactatagatactcgtgtcccaattccaaaacacaatgcacaagctgaacttgggctgaacgtggcgtgttgagatttggaatgaggtttctaagagccgtgttcttcatggaattttccaggccacttggcagcttggtttaccgatggatgggctagagatcttgtcgtttcttggaagtcacagggaagattgaagagaacgcttgagcatccttggcaacagcccaggtgggacctggatgaagctttgcactcaagtattgtcaagggaagcttcctgtgaaccaaagttctcaggccaaggtctcgcccaccaaagccagaaagtgcaagcacccgtctacccagctctaacttgtatgtgtgagacagaccaggcttcgggggtaggaggatctgcagttgttcagccgtctttctgctggtgttgtctttctgccatcagagaagggacacacagcccgttcgaaggtgtgcagagggctctgagcgccaggatggccagggctgtttttgctactgaaggagcgtgtgtcctgaactcccacttgcagggacagtccccaccttctctatagccggcactgggagcagccgccagcagggaaatctggcctgagcacaaggatgctttagggagagatcacttcagtgtgtgtgtatatttatttgcagtacagtgcgcgcgtgtgtgtgtgtgtacgcgcacgtgtgggtgagtgcgtcttctgagtgggttctgttcagttgctaatgaggctcctccgctctggacacaacccttttatagattaatttctctgccaattaacttgtcattttcagtacatattttactattccacaccaaccataattacaacaagggatttttcttatgcactcctatgcatgtgaataacatgtggtgtaattctgcttcttacagaagtattactgaaggtattatttccaatattatttggtttattatgcggatcttttttatatatgcagtcccatcccttctgtgccactcaatgccatccagacatggtttttccctccaggggcctttctccagagggcacttcggctgcctctgcttcctctcattcgaggcccggctcttgctgacagaataggttccgttctgggcggtggttctcgagcctgccattcaaaaccaaagcaaattggagcatttctcacaacatggtattgaagttcctttttgttctcaaaagttgtgaccgtgttaaattgtactcccttagtcctgtaaggtatgttaagtgaatcgcagttacgctgtacttttattaatatttaacataattaaagatggacccataagagtgacgcctgtggagcgcgtgctcttcctctgcagcc

SEQ ID NO: 1085 - protein, 528 aa, Homo sapiens
MRHCINCCIQLLPDGAHKQQVNCQGGPHHGHQACPTCKGENKILFRVDSKQMNLLAVLEVRTEGNENWGGFLRFKKGKRCSLVFGLIIMTLVMASYILSGAHQELLISSPFHYGGFPSNPSLMDSENPSDTKEHHHQSSVNNISYMKDYPSIKLIINSITTRIEFTTRQLPDLEDLKKQELHMFSVIPNKFLPNSKSPCWYEEFSGQNTTDPYLTNSYVKKRFRSTFDALRKAFWGHLAHAHGKHFRLRCLPHFYIIGQPKCGTTDLYDRLRLHPEVKFSAIKEPHWWTRKRFGIVRLRDGLRDRYPVEDYLDLFDLAAHQIHQGLQASSAKEQSKMNTIIIGEPPFLTQDFIHAFQPNARLIVMLRDPVERKDYLYFASSNKSADDFHEKVTEALQLFENCMLDYSLRACVYNNTLNNAMPVRLQVGAVYLLDWLSVFDKQQFLILRLEDHNVKYTMHKVFQFLNLGPLSEKQEALMTKSPNARRPEDRNLGPMWPITQKILRDFYRPFNARLAQVLADEAFAWKTT

SEQ ID NO: 1086 - DNA, 31085 bp, Mus musculus
gagtagtttcattttattgttttttctgtgctgtgtcttcatagttacacctcaatatttgttcttttctttaatggtcccttcctcctgtgtcccctagactgtgtccatggaacatgaaataaaattttgaagggctatgcccttcaaactctaactcactgatactttgtgccccattcttgcctcagtggcactatggtttagttactcctccatgggcacttgttgcctgcattcttcccttccttaaacaatcagtgtttaaaataaaatacaataaaataaaataaaataaatagctctgggcctattatgaggggaattcaagggaatagagcttggatacatttaagaaaaataaagtttttcttctctggctgtgacctctaggatatagccattatttctttatagccccttatccttctaccagctcagaggaagcgcctctcttggagctttcatggaatctcttcacaggtttggagaaatccttcactttcttcatgtcaacctctggcttagtaaatcacagccaaacattctcagagagccttagtggtagcagtttgcaatgtcaagcatgttgctgtggacaatagagggcagcacttgtcacatacttctagtctcagggcctagagtaggtctagaatcttcacaagaaaaagactgcctcactctgataagcatgaaatgccctctgttataaatctcatatatgatttggggtcatccacaagcatagtgagaaatcccacttgcccttctcccatggaataggatatctgtatcatacctccatcaagtatagattaccataaagtttatcttcccctacagaaagtctcattctccctaaacatgcctatctcaaccactaagtaagtgacttcaggtggaacttggacaacaaatggagagggaataattaagtcttagcttgggcttataagctgagtaaaataaaaaagattagctggaatgcaaaagtgcaaagggtagagactagtgggtttttgtggagtgcttttttttttctttctttctttctttctttctttcttttttttttttttttttttttttttttttttttttcttgtctttactctctgttttccctcaaagccaggaacaaaggtctcagagtttaaatgtgacttcaggcaatacttgttatctgagccccatctcagcagctgtcctttaagaaggacatttgagtccgttccttaaacagcgtttgagtacgtgccttaaacagcactgcaactcggctaaaaaggggtgagaacccacccaaataacatccccaaaagggtgaacaagtgtcactatacatgccatctgcaccagtatgcttagtgtttggcaccactcataaagggcagggggccaggtcagatgactgatgacagagaagaattctaaattgagtgtccatgaaacatgaggcgacaagatggcgctgtgccacaaggatacaccacacccggaagaccttagaaagtaattttaatatttattttaaatccggaccctaatttgcataagccacgcccctttttacctgtgccacgcccacagacattccagggtgtcaggtgactgccaggtgtcaatccagtgaagccccacccactctccacccctgcacatagtccctaccccctagctaacaggaagtgcttctagcttaattcaaacctgcatagacgccttcctgtctgtcaggcaggggccaaagccccaccctctaatgcccccataccctagtgtgggaaagcgccatagccagctgccccataagtctttgcagtactttactggcatatcatttcccaaatttggagggggctggaagtgggcgtggaggggacgaggtgagggataaaagcgtggtgtcattcgagcaggtgccttactcagtggtggagagcagaagccacttctaggggctctgttatcatgcacgctctaaaactccctctcaccgtctcttcagactcagactcagccccttccagccccgccgcaacatcgtcgccccggctggagggcccgggcaccacaaccagagcaccccctgctttggagggggctgctaatattgacccagccagcggatcatcgtccgggcaatttcggaagagaatcttgggcaccagtgactccccggtcctctttatccaccgtccgggaacttcaggaactacgaagcgactagagtacaggtaactaattgatttccccttgttcatgccttttgtgtatgagtgaaggtgcagtttaaatattctggtgtgggtaggtggctggggacttgggagagttagggtccttcagttagtctctgaagagggggaaggttgccgctaaaccggacggtcttaagagtgacttcaacttctgaggggacaaaaggacaactgggactgggacttaaagggctgcacaaagctacaaggaaagtatggtttcgttctctaatctaccatgcaaaggggagaggcagcgctctttctcttcccagcaggagtacacagctgtttttgcaaatgtgaaatttttctgtgtgaacattttccccctggtgtatgctccccccgctcctcccccccacccccaccccactcccggctaaactgtgcagaggggccagagattctagagcagtgtgggggtgtgtattattattatacatatatattatgtagatgtatgtatatatatatatatatatatataaaattttaaaagcaaagtttccctgtttttatatcctgtacctcctaactaccaccaggatactggagggtagatagataggatgatgtgccttgctattccctagcagggtttaagtacaaaaactgcttttctcctggctgtgtctgtctttaactccccctcccccccccccctccgtgttccctgtgcacaggcaggaatttggagcagcagccacagcactcccagttgcacattcatttgtgcacaaagctttttttccctgcaactgggatcccagactccttaatccaccggtataatgtttatggggagaagccctgccaccccttccagaagttgccttcctaaggcagatccatgtgccctttgttttttgttcccatccaaggtagaagtgtgaggagaggaatgggagacattcacatttttagctgtgacccctcaaagaaagccttttgtgtgcagcagcagttttacaccaccaccacccccgcccccagccaggcaggagccagattgtccttcccaaaggagggtctcctgcctctccctgaacagttgtcaaacttggcaaagtgacttctcaccaactgcttcctcccttctactgagaagggggtggggagagtaggcagctgaagggacagggtaggggggagtgctccaaccatgacaaggtgacccttgggcttccccatccagcagcaaggtggggggagggggccagactcagctggagaagatttgtttttgagataatctcaaggatttttgcttctcctcctcaggggacgagtaattaaaacagagctcactgtgcaagaggaggaggaggaagaggagaacgactacgacgactgcaggcccctaacccagggttctgagtctcctaaggctaaacttctcgtccagccagagctgcagaagcctaagtccaggcctgtgccaccaaggcctgagccgaggcctgagccacctaagcctgagcccaggcctgagccacctaagcctgagccgaggcctgagccaccaaagcctgagccgaggcctgagccaccaaagcctgagccgaggcctgagccaccaaagcctgagccgaggcctgtgccacctaggcctgagccaaggcctgtaccacctaggcctgagccgaggcctgtaccacctaggcctgagccgaggcctctgccaccgaggcctgagctgagacctctgctactgaggtctgagccgaggcccgtgccaccaaggcctgagctgagacctctgctactgaggcctgagccgaggcccgtgccaccgaggcccgagctgaggcctctgccaccaaggcccgagctgaggcctctgccaccaaggcccgagtcgaggcctctgccaccaaggcccgagccgaggcctctgccaccgaggcctgagctgaagcctgagcctgagcctgagcccgagctgaagcctgagccggaacctgagaagaaacaggctagagcatcccgagactccagccccgtgcccaagtgctgtggcctgtggcccaggagatccccacgctcccagaactgaatgaaacctcagaaacctcccaccagccccagtctttcctcagaggtgagtgtccttcaggtatacagcagaacagaggtatctctagcacaggagcatcagagctcctgcaaatgcaagactcagccaaggaaccagccaaggctaggaagtctagtcagtcacagtatctgggattcaggtgcgctccaggtgtcacttcttgggaacaaggggtgtaagccaagcagacacgaggcagcagtctctgtaatgcttccaggagtccaggggcaaaggtagcaaatgctggggaaggggggaggtcagacagctccagagggaaaggcagggttccagatgaggaaagaatctaaggaaagaaaaaagaaaaacaaactgttagctaaaaagaatctggaggccaaggaaagctgtgtgtgagggttcctgttcccccttcccctgactatgcatttacagctgtggtgctcctgcaccagtggcttgacctctctgtgtctatccccatttgtcaaagtgtgtgacagtctcaggcttcctggctgaactgtgaacagcaaatgacataacaaccaaagagacattctgagagctgtgaagggccttaggagagtgtgtgtcctaattctattgtgttctgaaggccatgggtttcctgtgtgtgaatggggtgggaagcagctagagagggcacggggccagaagcactgtggactctgccgaggaagctctgctgtttggtggccctgcagttcactggtcaggtactgggtagggaccagggaggtagaggctgtgtctggtggaatactggagactggggggcagcatgtaggtctgtgtccttgtgcctaagcctcaaatggcacaggcttcccagcaggtgaattccacccctcttccaggatatcatgctcatgccagaaagaagccaagaatcttctttcaaatgttggttcagacactaaaacaattacatagtggtatggcttcagtctatccagacccaggacactggccttccctgctgacccctctccagtgcccccacagcaacccttacttacttttggtgtgggttgtgttgatcagtttggtgcaatcctcatgttggtggttcaggtagtgacttcttcccaggcttgcagattggcatagagcattgcttgggtcttcctggtgtggagtccctatgtggtgtccaagaccgcagcccagttgagtgtgtcctctgtggcaggcatccagcacaggcatgaggaagagcatgctggggaccctcggagagaagtagggtgtgtaaaagtcttggcttattcctgagcagttagcccggagactacaacaagctaggaaaagtcacacggggggataaggaagccccactgcctggagggagagaggggagacaagcagaggccctggctgagggtgccagccaggcttagtgggtaagtctgaatcttaaaggatatttagtttcttcagaatttgagcttttaagcccagaaaggagacctaggctgcctcggtggtggggcagagcaggggagggcaaggattgggatcagcacagggctaaagtctagtgggccaggccctatctagaagaaacaatagaccccatgcatgcaaggtaggcccctttctaccttgtaggggggagagggtaggcaaaaataaggaaaaggagagggccttagagaaagaatctgtcgctgatcctagctgggggtaggctgtgtgcttttgagccctaggttgacccggaactgtaccaggctcttccctgccccttgagccacactttgactaaataaggtcaggtgaaggctctgtgggcagccacatagaggaagaagaacacatgcataccctggcccccaccctatcccgcctgcatgccctggtggctcttcaatggacaccttaaggtgacctcagcgttttcctacctggcaaagtccaggagttcatctccggggtgtgagtcagcggcttctccagagacctctggagggcagaaagcagagattaggctctgaaacaggccacaggttgtgattgctgccctctcagatgccccttaggaaaaggaaggcaggactccagaatcgggactctgttcccagaaccttgctcatctctggcctgtgccccttcttggggaaaggtagagaacccctctgccggcccttgccattttttttttctctaaaggagacccttagcagagggcttgcagcctaatctggcctcacaaggactagaggtgttctcaaacacctttttaatgctccttactcccaacaaatttacaagtctccctggaatgaggaacatcaccataccggtcttcctagctggaagcttcctcaaatctataggcacaaactcggagaggccagaaaagccagggatagaggctggtggatggggggaggggggcagcatgggtgtgggtggggggagacaggccagatgttcttggaatgggacacgggggtgattgatgcagactggaatttgaaaggggaacattccccacgtgcttcatgctccgggtggaaaatgggtggggtgggggctctctcagtcctgccaagataatatggagatgcctcgccctgtctaggtccccacacctgtccactgactttaactcctgcctccccagagcgttaggctttgagagtcctccctgcataccatcctctacgggtggttatagaggcaagccatgcttacagtcatggccccagggttttcctcattctcctgctctccagctgctcccctatctaacaccccacccccaccccccaggtcctgctagaatcatggcccttcacctccagcattgctcaactttgagggggtggccttgttcccagcaacagtacggtgagcctgtgtatggtgtgtgggtttaatatttgcctttaaggagctggactttccccagctaggattgggaggctagtggcagaaattttctgagaaaacgaaatgagggttctagcatccggcaacggtcaccactgtatcattctgctatgctctttccccccactttctcctctgctcccccattttttacccactttccacagtgcccaaacaaaactatttcctacattgttcatcgttagggagcggacacggccggataggcgtgtgttagcacaggggcggtcaagggtagccactgggggtgccccgggccccaaaactgagctagggacgagtctgcccccggcggctgcctggccccgacttcgcctaggctcgcggcgtctgagcgcgtggggcgcaggggcggcggggagccgagcggggcgccggaacctaaggagcctcggggagcagcgcgctgctccccgacgttccgcctccctctccgacgcccgtcccgctcggcctctgctacccaaaccctctcgttggctagaaggcgaaagaacgaaaaatgaagctggctcgggcgcgcgctctgtggcgtccgtgctcccaatctgcgtcgcctgtgcccctttcccgcgtctgggttcccccgtgagggcgcccctgctccgtgtgagttccttggcaccgcggatcctggcgccctgtccttcccggcccgggagctcactttctcaaattcagctctagttctctgtggtccccctacaacccgaggaacttaccggcttctctgaacctcaggacttagtttgactgagatccttgaaatttaagcattgctttggggggtgggggtgggggctccaaaatcggtcagcatttgttctgttcacagggaaaaggttttgttgttgttgttgtttggtttttattttgttttgttttgttttgtttttgatacttgctttccaaatattttaaagggtgggaattctgcctctgctgactcctcacaattagaatattttggcttgggcccccaagtttgcttctggctcctaaccattttaaatgcaagctcctatatatagatataaaaccaccattctcagttccctaaaatttaaagtaagcctgggtccttagtccttttgacaaaatttccttacttgggagagcggacattttgacagcatttaggcactgtctccaggggatgaggtagcggggtgttttccccatgttcctatcattttatatctgcagtaatgttcctgctgactctcttcccccgccacccgtcctctggttttattaacgtggaacactagattctgtagtctattgccctaactccaaattttacaagttgaatcccacccagacagctttaacaattttcctggcaccttcaaagtcccaacctttttttctatgtcctcccctaaatgtagacacctcaaatagccctcactctcatttctcggattccagaaaatggaaagagtacattcaccaatcacatctaaaattcacttaacaagacccccccccaaaaaattccacgaatacacactggtcacaaggctttggggctccctagagctcctgcaagcattctggccatggttagggttctttaaaatataaaatataaactctctcactaaagcccccaaagcaggctgagcaatgatgtaaggcatgaacttctatgtggcagagggctttccatgctatcccaagtcttatatgactgttccatgtctttctgggtcacagatggcacaaaattaactcttggccaagtcctttttctttatattagaatgttgaatgtctccaatccttgaacactgatcatttttttctgcatcaaatctgggtccctttaacttaacaatttggaaaaaaaaattttttttaactcagacaccaattgcaaaatccagtaccatcctgtatccttttcatcccccgtgttggctcatgcctggtgtcctcaaacattaggcaatattttccaggccccccaaaacacacttagtgttagccttgggtcacaaaaaggttctgatttctcccactgcaataccagctatacacccactcagcccccctacatttcaaacacaccccccccacacacacacacacactatcttgcacaatctctgcagattgcaaatttgggggattggttctcaggccccataatttaggaacccataatctctattccttgtaatgtagagactggccctgaaggaccaggaaactttagattcagaaattatcttcctgggcccccccaaattcaggtactccaaaacaaattgagatttttttcttccaaagagttcggtttttattaaactttaatgaactttgttgaatttatgacttctactggagtctccctatatttggataatgttttatggtccccaaagcacactgaaaaaaaaagtcccagatcccccaattcctaggttttaaaggtctgtgtcttacaaatttcctagctactaattctattccctgcaatttagatttcatcatccattgggtaatttttattgatccacaaaacagggagtatgtttctccaagaacaaacattgtccaagaaaacatacaaactcccccttgttcaacaaaaagatcaataggaatctgtttaggaaattaaaatattaaaagacattgattttttctggctttctcaaatggacttcttgcatttctaattccaccacatttagacagcatttcctcattctctagaggacttctctgaagccacagaaattagaggtgatttttcccgggtgttgtagggcccactggcttcagggtgaaccctagtctccactcccacccctcaaaagaactgacctgaattccctaaaatccatctgttgtttttcatctcccatttttaagcaattaaaattaagctcccctaaatttcatgttgggaattttcttaaacccaacagcaacaacaaaccacctaacttctacaaattagtctaggattttgtgggttccccaagctttctaaccaagatattgggttcccctcgttaggcctggatcaagatgccccccatttttgcatagaataattttcctcattccccaacttggattctaatttttctggaatctcaaatttagtcattcgccacagttttcccatttatggagtcgccttcgagtccccctactttgggccgctcattcccaggaccgcaaatcagacaagggtctgacttgggatccccgaaatttgatcattgtttccgctggccactttcggcagcttcccgtcctgcgcataacagtggtatcggcctcgtcacttctcctacggtgtcccagcggcagcacagattttggaaaagtgtgtgtgccccaaacacgcactggacactgcgcggcggccaggacgtgggcagtgttgctcccgtgtccaggaaaacgactgggcattgcccccagtttcccccaaatttgggcattgtccccgggtcttccaacggactgggcgttgccccggttcactggggactgcccttggggtctcgctcaccttcagcagcgtccacttcagcagctcccacttcatccgctctcccgcccttctcctccgatcctcctgcgccagcggacccgaccttcggccttgtggtgagctccccgtggcgcgctccctcgtgccccagctcttccactgcggggcaccggctacctcgcagtttgtcctcagggctgctgcggagtagcgcgggagcgggctgctggcttctccctcggcggcagcgctcctttgggctgggcgctccgaaacgcgcgccactttgtgtgcactctgcaaacaacgcggtggtagggaaagcgcctgggcggccaggaagcgggaagggcagagcgctcgggcggcttggagcctccaaccctacaggtcgagggcttggggaagcgagtgtagagcgcgggcgcggtgattgatggtcgggccgggaggttagccccgggtgcactggtttccgccagtagtggccctttagaggcctagaggtgcggaggtcgggagagggaaacaaggtgcaccggtttagaagtgattttgacttggtaaaaatcacaatggcttcttatatctgaaaccacccggggagagtttcttaatagcccggaattatcgcattggcccctggggccgaacctgcaactaagcaaattcaaagtgctgaggacagggaactgttatctgctcatactgggtggggtcccaaaggcgcgccgcttagaagcacttcagtgagctctggtttacaggtctggtttgagctacgtttcccgccctgcttctttttctgctgaagggcgcagacattgtgcgggggctccacgcggggcccagatttggcgtggccaagccagccttcccttcatggtgcacctggtggccccccaaaggctgctaggagatcccaggcaaagcagaggttaggggcgcttagtaagatctatctggctgctattcgaggtgcctcacagcccgccctgcctgctcaggcaggtggaggctgcgcgctccccccccccccccagccgatccaggggactgtcccctgcttagcaagtaggtccctgtgagaaccctctacccagctacctgcgccttaactcagtcggccgggatgcgcctaccttgtaaccctctaactgagcacaggtcctgccactaccactgaggcctagggtgccacgcacgttggttcgcaccacgcgcccatgttgcacaagcacagggcaccccggaaacatgacatgggacctcgatttttagggatagacacccaggatttagtgggcctgttggggcgcacagcccccccccatctttgccaccaggcactccactccccccccccaccggcaacccccgtgcccagggcccccgacccgcattccccgcgtggctcgagttgcgggggcggtcccggggcggggcgagggccctgcggacgcccattggcgcgggcgtaaggccagcggggcccgagcgggcgccgagccgcggggtggcgcggctataagaaccgggcgttggcgccgagttcgcctgctctccggcggagctgcgtgaggccaggccgcccccggcccccccttccggccgcccccgcctcctggcccacgcccgcccgcgctcggcccgccagcgcctccatccgggctggcggccccgcgtcgacgccgtccgccacctcgctgctgctaactcctgtgcagggcgccgtcggcgggccgcgctccgtcgggcctgcggatctccccaccgcctcctcctctatctacctcaacaccccattcctgcttcgccagaggaggcggtccccaccgcaggcagtccggcttgcaggtcgccggcgttgtcatcccccgcgcttcccctcccagccctccccggtgcgcagcccggctgctcccctcttttcgctgcagtcccgagcagctgagcgccgccacgcctgtcccccccacaagaagcccgggcttacgacggctgagggctccgtcgaccctaaccgagctgggtgcccgtggcggggtgacgcctccattcctcccccctcaacaccgtcctcggtccttcgaagttgcatcctctcctctgcttagggtgcgccccccctcgcgcacccgcttacccgccacctttcctaagctcccctcctgccccctccccgttcctcctcgcctcagactccctccccctcacgtccgccctctgccttcgcctacccaagtggattaattatacgctttctgtttctctccgtgctgtcctctcccgctgtgagcctacccgcctctcgctgtcctctctccctctctccctctctgtggtccccccctttcacgttcactctgtctctctcactatctctgccccccaactatccttgatacaacagctgacctcatttcccgataccttttcccccccgaaagtacaatatctggcccgccccagccctaagataccctaaagaagcagaagagacgcccccctccccaccaaaaaagccatctccccgttctgtcccgtcgcacattcggcctctgcgactcgggcagagcggcgctggcagaggagtgcccggcagaagggccttcgcccgctgttcggtttgcatacccgcagcagggagatgggcggcagcgtcgccggcttccaggtaagggctctcaggggccctgggagtggggggtgcgcagagcccggcttgggcatggcgggactggtgcggtgggtggggggctgggggctcgttccctaagcaaacttttgttcccccttgcgccatggagtgggggaaggggcgggggtatgggggctgttggggagggggtgtgtaagttgaactcacaggagacttcctggtgctttactgtgtgttggggaagggggggatggatgagctgcataaaatgtacgattcgtgctgtgcaggccctgtacacccccccccaagggtgctgagtgatgaggaggggggcagagtctccgaagcccaccctggtatgttgactttgtgccaatgagacaggaaggaaaagtgggtgggcggggccaagagccccccaaaattggtaaaagagtcaagccagaccccacagttagcttttccccccacccacacaccccaactctgtccccaacattcccaacctggaatgttggggggagaggggacggtttcgggctcagaagggcagaaatgttacagttcaaagagaaataactgcccctgccttttactgggtgtaactttccataggaggatgtgggaaggagccccctccctccccccattggtctgtgcagaaagggctgggggcgcacgatgaggcccccctcccactggtggtgctttgctaaggaatggtccaaggctagctcttgggggtgcaggagaaaagggactggctggaaggagggagggggcgggtgcaaagggggcggggggagtggtcagcagggagggggtggggggtagggtggagccgggactgggaggagccactcagacataaaaagcggaggcactgaccagttcgcaaactggacattagcttctcctgtgagaaccttccagccttttcctgtcttcatcctcttccagccccagcggcctccttacccaacttcaggtaaccagggctgtggagccaggaccctgctgccatccccactccggcttgcccagtggggtggtcagggcaccgggtagcctgaggcctctgcccttgcagccgggcctgctacctctcccaagccttcgttctccctcagcctctgtcctatgccccccactagatccaggcttccttacctgcccagtcctctacttttccttcctctctgcctccccactccaacaaattcgggccttccctgggccctcacctgtcccttgcctcctggtcaatctcctgcttgcttctcctggacacctgggctgaaccagccagtgtggtcttggctttgggaagggacttcgaggtcagctccgtctgcctgccccccgcccccagaactaactgctgtagctatagcctgctgatcgcaagtggttggtggcacagagggtattgggaggatcggtctgggtcttgatgaagtgggcaaagatgacttttagttacccaagggagctcgaacaaatttgtttcttgattattccgcactggtctctcacatgtttctttgcagcaagaaatcccctgggcctatggagcagagattgaggctgcggcctggagggctctacttaactgaagggtcaagggtggcttactgtgggtcatcgtggcctcccaccactaaaaaagctagctaaccattgtccccgcctgtagccacatagcctgtggagggggtgtgtccctccaaaatggggtgtttagcctcccaaggacccaaactgctgccctgggtaaatttagctcttatcagaaagatgattctatgggccataaagggaccctctagggtccctgaccatggatggcaagctctgaggtgcccaggaaagtctatacttggaggactgggtgaccctggagagcaaggctcacaggagtgctggctatcccattgcgctaaccattggattctgacatgggccctgctcaccatggcctgggaggtggggtggatgggtggggctggctctgctgcttagggaggggtggccagctggggggcgggtaggttgggaatggtccctttggatgcacatgctccatggtgggtggggtggagctatctgccatcttggccaatgcttggaggccagagtaggagtggcagtagtgatgtgcccttgggctggccccacccccatgatgtcatagcatggaaaccaggtccagtgtccagcactggcccctgctgctgtgggtgtggttaagctgcaattgcgcccatggatgggtggtcctcaagggtttcttacagttcaaagccaccacggggtgccttcctggggtccattgaatttctccacactcaaagtagtttttgacctcagcaattcaagtccccctgttttcacaggttaaataaatagtgacatggctgtctttcagattccaattgcatttttaattaagagatgataggtgtctttggtggggcctgggtgggggtgagccattctcctgggattaggggtgtggcttgggggcctctagctcaaagcctgcgtttctttctccaggtaccaatggggatcccagtggggaagtcgatgttggtgcttctcatctctttggccttcgccttgtgctgcatcgctgcttacggccccggagagactctgtgcggaggggagcttgttgacacgcttcagtttgtctgttcggaccgcggcttctacttcagtatgtaactccagagaggtgggggcgggggaagcaagcctccctggatggggtgacaattagtacactggtctggccttgctcttaagctaccccttcccccccccccccgggcaaggtcgtaatctcaaagtcacaagtctgatagttttaaaagtttttaaagttgataaaagcaaaaccaaatgtggatgtcaagtctcagccaggttgagagtgcacgtgtagtttgggggtacaaggggagagctggaccttggccatccaacttgaggggttcccaggactacaacatggggtgcttgcctgctttcaatgttcatgcttctcttgatttcccagttggggaaggggctgggcatgggctcactgctcacagaaggcagtgatggggacacatgggtggggcatgcctgggaggggcaggggcaccagaatggatgactatccttgctggcatgggccactctatcttcctcgcctggtcctggacacgcagcctcttcttcttcacttctgcctacctgcctgtgaactgctctggaaacaactactgctcatgggtactgcaggaccagtccttggtcgagagccactcctgcacggaggggcttcacagataggagggccccaagcccaacctcggaccgtgggggagagggggaagacgggagaagagaagggagtggtttttgggtgcctcactcctcccctcccgtcttgttctctcctgccctatcttcccttcctgtcacagttcagcgatgggggttgggggtgggcccctcaggacgggccccaagtacagggaccacacctgtgtccaccatggccccctcgaggggctcaccccctcctcctccctgttttccaaaccactccagtgtggcctctggtctccatggagtctgtgggacagtgaagctgtgctgtgttagttaccagacaggaggcaccagatgccaggggctggtcctgcagcatgcacctttatttttcctttctgggcatcttggcctgtctggctcacacttctaccacatccctgcagggtgacctagtatccggccagggtctagtggaagggcaggggtagttccttcttcagccttcccctcctggggggcggggctggggtggccaccccaatgggtgctgaccccagtagacactaactgaagttgtctgtcctgtggaacttccaggcaggccttcaagccgtgccaaccgtcgcagccgtggcatcgtggaagagtgctgcttccgcagctgcgacctggccctcctggagacatactgtgccacccccgccaagtccgagagggacgtgtctacctctcaggccgtacttccggtaggtagcgaggtggggttgaaggaattatggggtgagacaaagagaccactcacttcttgatttggggtaccacgaagcccccctcacacattttactgtcagcctctgctcattaacatagatatttcagggaagttgccctgaggtggggtgactctagtggggctggggatatgcgacacctagatgggagctcaggctaacatgataccctgaaacctgctgactagcacctcctctccaggacgacttccccagataccccgtgggcaagttcttccaatatgacacctggagacagtccgcgggacgcctgcgcagaggcctgcctgccctcctgcgtgcccgccggggtcgcatgcttgccaaagagctcaaagagttcagagaggccaaacgtcatcgtcccctgatcgtgttaccacccaaagaccccgcccacgggggagcctcttcggagatgtccagcaaccatcagtgaatcaaattatgtggtaattctgcaatgtagtaccatcaatctgtgacctcctcttgagcagggacagttccatcacgtcccacactaagatctctctgctccactccctccccaggtttctccttacccacccccatgccccgcctccccacatcaggctgttccccttgccccacaccatcgggcaaggggatctcagcagttctaaaaaaccaaatttgattggctctaaacaacccaattgacaccccccaaattatatattcacattaaaaaaaactttaaaaactacagtccctttaaaaacaaattggcttttaagaaattccataactgataatctaaaaattaaataactaaagaaattaattggctaaaaacatactaaaaattaattggcttaaaaacaattggcaaaatcaaataattcggcgccccccccccttcatcttctttccatttggatctttagtcaaattggctaagacttggatcccagaacccaagaagaaaggaaggggacccaaaattttgcaggtggcatgtcattgcttcagtgccctctccttatcccaagcacctttagtgtaaagctggctgagaacaacaatagccgcccaaactctttcttcactggtcattccatcacaaatgtcccccatgtcaccaagggggctgggtgaaagaacccaaggagaagaacagaacatgaaaactggaaatagaacttaattggcacaagcccccagtcccaaaatctcacttttccctacctaccctaaaaagcacatgattatactcacacccacaggcattaacacacacatacacataacacatatgcacacacacacacacacacacacacacacacacacagaggtatgcacacccacataattggatgaaaacattgaaatggctgaacaacttcgatttgaaccacattccccaaaacaaggcccatcccaaatttcctgagcagtttgcatggtttgagctctcctcccaatccatctagtttctgctgctgcttattggctctatgtgtgaccaggctgctagttctgtctttctcagtgagggaggtgttctagcaaggctcaattccatctaagcacctgtccacatggtgagcccggtgctccccaaccacccccgccatgaggaccaatgactagccagtgtagaataagtttggccagataaggagatggcactgccaagtgatacatgctgcccaagtaacctgacccctagttgtgctcctgggaggaaagatctgggggacaacccctaccctgagcacacctatgggccatctttgtcagtctcctggggagcccccgctttttaggggctccccagagactcacactgatgtggggagtgtgggaagtctggcggttggaggggtgggtggggggcagtgggggctgggtggggggagctatgggtaggaagtggtcccagagaggttttaggtggaagaatcaggaggagtcacaggtcaacttgcagaattactgaagaattaggaccccaaattttatgccaattgatctattcccctctttttatttctggggccggttttttccttttttttttaatccctccttagctttttatgcgctcataatcaattgtacccattccctacataacgggagcagtgatcaggtaatgaatgcatcgagccatcaacaccagctagagccatcaacaccggctaccacaatgtcctgctctccacaaccttgatttttttttttatctctctctatcgcttggcctgagttgggagtggagtctctgtggggtgctggccacgcacccacagagaaataaaaggaattgagaaggtcgctacctggcctgacttctggggacagtggctggtccccagaagttctgaggagtggagggggcgtggggcagtgtcccctcaggtgttaggaaggtgctcggaggccacaaaagatggggctcccagctggccactgccagttgggggggaaggggatagagatgtgagagtagacaggttacatcaggcgggagcaagtggctgccttctgagcatttgggggagaacctctcccgtccctcagtgtcatcttgcccactcctcagcaccccaccttgcccccaggaggtctggagctctacagacctcctgggggcaaggtggggtgaggcccggagttggggaagctaggaggcttaaagcctacagagccaggagaactgtatacacggggtcatctgggccctggggcctgagggtctggcgagccgtagcagccactccacggtgcctaggactgcggcggggaacagggcggctggaggtttacctcacccccacttctgcttccagtgcagtccccctgcccaacagtccaactagcaatctagaggcctgaggcttctgggcccaggtgacaggactggcaccaccctgggggcggtgtgtgtcagccaagcatggcacagagggtccctcagcaagtgcctaaagaatgggccatttggaacattggacagaaactcaaagagtaaattgttataattggagactatgaattggcctggtatccaaaacatctcgaggcaccctaaattacctgcccatttggctggacacccacccagtgttaatatgcctcgtgggatgggtgctttcaggggcatttgctgaccaccctctgtgtccccacatttgcagttctccccatcataggtcaccttgatgcaggcacctccctggcctcctatgcctagtgtggccctccatcttgtctcttccctactgtcttcagtgggatcccctcttgggtccctccctttgtcatcatgtgaagacttcccacgcgtcgaacgccatatgtcacctgtgccactgtccatgtcatccagcagtggccccaggtgtttgcctcaactcagtccctctaacatgcattttctggcaaaatccaaagcttgggttttgtttttaacctgttaacgctcgcaaacctaataaagcatttaaaatactatttattgagttctttgctcttttatttgggggagggggcaaagggagggaggggaggagtaaagggtacctgatgcgtgggggagggggacatggggggcagcagatgaagaggaaaagcctttgaagtatgagaagaagtagggctcaataagccactctgaggaacccagagggtagaggacatttgccctaagtcctcaaagatggggtgctgtggtgctaaaggggtcccatgatgttttcggatgagccatgaatacctaccccagggaacattgcccttagccttgggagttggggagcaagatgggtgaggacttgtggttggtgatggacatggggactcagggtgaaaacacctaagatggtttccctgcacatgcagtcatccctactgttccctctataaaggctatgctagagtctgtccccagtagttattagacccacctgcccaatggtagtggtctttggcatccctgacactgggagtaaagtgaggccaacccctagatgcttgaaacctggcctgggtatcttctttctgcacctttacaagtccttagtcccccacttttcctagtgcaagtgggcacatgcccttcccctgtgggaggagcccaggctggggcagcgctgagatcttgtgcctggcaccctgctccttttccccagttattgctacacactagcatttctttttactgtgtttggctagttttttgataaagagtctcacactctaccccaggcaagcttggaactgcacatggatggatgtccatgctggcctggaactcatggcagtctcaatcctgccccagatacctgggtgctgaaaatacaggtgcaagccactggttagcattagcttttagttttgtttgcactctagagtctctgctggtctgctaaagggggacttcaggacagcctacaaatccaagggctgcttttaaactcagggtacacccatccattgccctacccaccctatgtcctacatccacccacctatccttgcccatttacccattcgccacccatgcacccactcaccctctcatctatcccccatccactaatgcacacattcatctacctatcaatctatctacctacccatccatagcatctatatgtctgctatataaccatccatcaagccacttacctatctgccaatttgtcctcaacccacctcccatctatccaccaactcctctacctgtccattcagccacacatcccatatcaacctattcatccacctaacctctcatctacctagccatatgtttacccacctacccatcattctacccacccatactctaattcactcaccaacccattcatccacctattcactcattcatctacctaccaatctaccaattcatctacacccattcatttattcatccacccacccatctatccatctacccaccactcaaccatctattcatccacccatccaccatgacttgttcatttatctacccactgactcattaagtcacctatttgtccatctgcctacctgctcacccatccacccacccacccaccatctgtctatctatccattacccacccactatccattcacctatcacttccccattcacacatgtgggtgggcatctataatgttcaggatgcctcatcaggggctgggtgagtgtgatggaagtgctgaatgggcctcaccaagaagatgacacacagactgtagaaagtatagagaagaacatgtaaggggtgggatacacatgcctagacctagagcattagagcatcatcacttggaatggggtagggtttcagcagcaggagggacaaatgtaagtgatgatgtcagagctggaacaaggtcaggacacatgggccatctaaaaccattgctatccactcagcaaacacttatagacatctcttcactgggttgaatgatgtcctccagaaatacatatttatctctggacactgggacctatgaatgtgaccttatttaaagaaaagaagggccttcaaaattaaagaaggactttgcaatgacattattttgaatttagggtaggcctaactcaaatgaaagttgtcctcaagagacctgagaaggttacatatggaataaatttatagacaaagacagaagcagggactggagttatgaagtcacaagccagaggatgcctggtggtccttggaagctggaagagttaggaaggaccacaatctggagtcttggaaaggagcatggccttggcacaccttgatattaggctcccggtctttaatgaaatgtgttacgattgtagaagctcccagtttgtggttgtttaggaaagggattacactagagtgccctcattctgttatagtacagcacaggtctgggtatggaaggtcccacagcaagagcttctagttagtggtctaaccctgccaggccacatctccattgccctacctgttccacttaccttcctgcagcagctcccaagtggtggtacgtgaaacaccagacaccatcccacttctgcttggaacatgctagatgcttcttgataagccaaccaactcgtggtgaccagaagccaccctgatatacccagccaaccactactatccctaacaattgtcccagtcacaaacgcctgatatctggggacctttgaccccctgcaagggctgcactgtctggaccacttcccgtgagagacctgctccgagcacccttccttcacaaagtctatcctgagtaccctgtacacaatggcatttcacatgtatggattccacaaagcctctaggaataaagagaataggcttcaattggcaccactcatgcccatttgttctcccaggacatcctaaaaacctttccaccccttatctccatgcccacaacctataagacagactctaccacacacacccccagtcatattcttcatgagagcagagtgatgagtccagatcttgtctttctccacttagaatctgtggctcacatggactgttgggtgaaactcagagactggctatgctttgggttcttcagcatataacattggcccatatctcagttgtcacataccaattctttcatctcttaggttccctcactcagtgtccccacacccagtcctgaaaggtggctgtcctctctcccagaccctttggtatctggcatcaccctgattgccttggcatgccttctgctatcctgggcagttctttactgaacccccaaatgtctgatcttctttagatagcagttggggccctttccctgttccctagagatgcagagatatgcaagacgtctgctttcaggttctcccagaatttgcctggatttctctgtagctttcacttgcagagctggccacagaaatggtccttctgggcaccccaggacaacctcttgggagacccaggcttatccatgtccatcttcttcaggggtgggtactagtcttccctggcctcttactcttggactaagtccctggagtaggatcagactcatctttaaacacttgtttccacctgccttggtgtactgacacccagggtcctcaggtctccccagtccctgaggcctggctcccaggagctcttgcctaggcatagacaggttggggttagaggcagtgccatgctgacagtatcctccaagcctggtctctctacctgctctgctgagccctgcccctgcccagcccccttctggctgctgggccgaggcctgaggcctcattagcgcagcctgcagcctctcccgctcccagccccagccaacccaggcctctgccggccagaaaccaaagagaaaatgcctgtttatgccagttatgccgaaagcaaaacagtttgtggtttgtgacccaaattttttgccttttttttttcagaacataacaaagcccaagacaactccctccctgcccccaccctccccccaggcagacagaactgatctgtttacactggctgctatgcacccccactggcctaggctctggccttgccctcatcctgagtactgggcgcccccagaaaggagtttgtaggcctggtgaagtggcaaggaaagtgaaggaggcagaggaggctctgtctcccctggggcaatggaaggatacatctggagtctagagtacagggctcagtcagactggatccatcctggacagaggaagaaggtagggaaagcatggtgcagttgatccccaggtctgccctgaggtgccaaagcttacctccatttcatgagactggtgcctaggccaataggccctcagaccacctgtccactagcctccttcctgcatctcctcatccctcaaggtccatggtgccctgaagcctacagaacaggaatgtcttctgtcaccatgtcctcggtcagggggtcaacagatgaacagccaggtattttctggtggccattgtgaaagtatgaactacccctgaggagctggctgggattggttgcttgaactgtggaagtcctgtggtcagggctctggccataaagaaagaaggacagggttcccacttgctcttgctttcttgggagacaggaagcctaggcaagccttttcgttgaaccgtatcacagccccaaagcagacactctctcactcctcctaggaaattctagtctacactcgttttcattctcctgtgtctgtaccagtctgggtcatagaaggggctcctctgagtcaagggggccctaagataagttccaacagaggagacagaaggatggcatctgggcctgaaaaagacctccctctaccatgagaaattttctgcccttgcatctgaagagggtggagcaggaggacctgtatatggaagtctggaagagtgtctttttgaaaggacaatcaggaagacaaagggccccagggttgagtcctggctctgaaccttagttcaacctgccaaggctctgggtggcaacaggtagtttttagggagagaccaaggcacccagataaagtttaggaaagatggtgtacataaaggatgcattggagctggggaaggtttgtggggtaatgatagttggagcagaaggggcaggattgggtggggagcaggggcggtgctccagttgggaggagcacaatatgaggagcaccaacaccattgcactaactagggtggggtgttcttcccacccttcccagcctcataaagagcaggcctgggctcatctgctggtggggttgaagggtaagcaaagagtactgcctcctgccctgtaggccattgggggctgcccttggcctgcctggcaggctcctcttgctggcctagaggattgcttttgggaaagtctgagcagtacctctacttccccccctcccttgcctgccatccctggcctcccctcgatcaggaccagatgtgccttggagcaggaattctagttattttgttagccagccgcttgctggactttctgataaggcaaattggttctctacagagttgggcgtggaagagtaggagaaggaggagagagaacaatatgcccaccctctcatcttcctgtgccagtgacgccccagagaggttcctggcccaactccagaagcttctttctgacacatactagggtgataaaaggtatgctagtgcccaggagatgaaagtgggctaaactcgtggagcctccctacaaagcctggtaagaggcaaagaaatgcagagcagagtccctgcagtggtgctgttggtagctgatgccatggttgaactagtcctttaatggttttgcaaccccagatctaacaaagaacagtcaggctccccggtacatctgggatctcattgcttcccatttgtgagaaccacctaccttcctccttttcctttcctttcctttcctttcctttcctttcctttcctttcctttcctttcctttcctttcctttcctttcctttccttttttcctttccttttttcctttcctttttcctttccctttctcctttccttttttcctttcctctttttcctttccttttttcctttcctttccattttttcctttccttttccccttcctttcctttttccctttcttttccccttccttttcctttcattttccctcccctcccctcccctcccctttccttgttagttaaaattcctatcagaactcagaagagcaccctagaaccatgaggatggatagaattccattcttgtcagaatttcattctggtcctcaagatgatcataggaaacagaacacaatacatctttataaacctgatggacagccaggctgagaagatagccaggctcacactttacaaagccttgtcctgtcctctcccaaggtcctctttggacctttcccaggttcaaagaggacctatggccctcctgttggatctggagggccactcattctggaattgggccctcagatctgcactttgggtccctgcattccacaaaagcatattgtttctattctgtcaatgacattatcttgctagggcagttttgaatctcaaattgatcttccagcccttggcttatatcttccagaactgatctttcaatgtctagactggtacatgctgaagagcatgaactcaatgtgggttgcataaatggggtggggtgggatatagggatgtatgaatgtatggatgaatagatacaagaatgtgtgggtggtgagtaaatagaaggatagatgggtggacacaggcatgatcatgcagatagattgatggatgaaaagatgcaaggatggagtgaatagagttgggtgagtggatatatgtataggtgagtagatggattaactgatggataggcttataaatagatgaaaggatagataaatggatggatggatatatgcatcaatatatgggtgactggcagatggatagatgcatgaatgtgtgactagactgatggtttgatgggtgagtgggtgaatagatagacacatacatgatgtgtaagtggttagatggatggatagaagataggttgaagatggatagatatgcgaattgtgaaaggttggatggatggtagataaactcatgaatgtgtgaatgttttgacaggtttagaaaggcaaatggatagatgtgtgagtatatgagcgtatgaaaggatagctggagagaaaaatgactgggaaggttcatgggtgtgtcagctgtacacccataagcatctacctgagttctcatctgagatggtcttggtgtagaatgaatgacaagagtaaagacactgtaatttatggaagtacccgtttccatagtgtgtgtgctcattctggttgtactatatcctccttctatagtctgtccaagagtaggagttgtgatatgtttattacttatgtcttattattttttatttattataatactgtatactatatattatatgatgtatgtcacatataatatataatgcatgatatataatagatcatatatcttagaataatataatatacaataatataacatacataatcattatataacatattaatcataaatacaatatataatataataatttattattgtttataccttgttatttgtttattatatcttatatctaattattaattaaaacataaggttagtatctagctttttctggagggcctagaaaaatctaaaaatgtcaacaactagacttctacctgaaagttataaactctctcagagaaagtgtcatagttttatgggcaggtttctaaactctaaaattatcactatgacttataaagcacagaagatgtttatcataaaaccctgacaccaaacccaatcatggtagcacaaaaaaggaaaacccacagtttcaagtcacatgtgaagaaagatacaaaagttacccatcaaggaattagcaaactgagtctggcagtaggttgagttaaagtaataacatgatatggccaaggatcatcagcttccaggaaggcaagggtgactcattagtgaaaaatccacttaatatcatcatgtaaataggccaagggaagacaaaatgtataaaatagagatgtcccagaaatatatttaataaaatccaaaatgtatttccagtattcccagttaataatacatgcataaatggctagggctcacctcactctggtggtacacaacttcagttccagcactcaggaagcagaggcaggaagatctctgagttctaggccagctttgtctacagagtgagttccaggcaagccaggaccacacagagaaaccctttctcaaaaaacatcaacaacaagcaaacccaaaagaggctagggctcaaaataacttccctgaatctaagagaagatctttgttcctgagtctcctggcagcccatcacccaccacccgtgtctctgtcactcttctgtcactgtgataaaacaccatgatcaaaagcaactgacagaagaaagtttattttggcttatggctccagagggtacgagtccatcacagagtagaggcatggcagcaaccagcagacatgatgaccacagagggaaagctgagagctcacatcctcagccatgagcatgaagcacagacagcagactggaagtagtaccaggcttttgtctcaatttttcatcagtaagactatcccgcctaaacctcctcaaacagtgccaccggctgtggactaagtattcaaatgcctatggggcaaatgactatggaggacagttctcacttgaaccattacaacctgactttgtcgtattccattcacaccatcatccatgtctccttactttacatcacatcgtcacatgagctacctggtctcccatctcaccccctaccatgctcgtcaaggtcactctcaaacgtcttttttaaatgaattttaataatttatgtgtctgagtgttggcctgcatgtatgtctgcataacacccgcgtgcctggtgcccagggaggccagaatagggcatcaaatcccctgtaactggagttacagacagctatgagctgtcatgggggttatgggaatcaaatcagagccctctaaaaaagcagcagtgttcttaagctctgagccacctatccacccagatccccaaatttctcacagctaaatgtaatggttgtttctgtaccagacttagcagctcagttgcaccatggctgctaaagtcccatttgattctgaagttagcagggttctacatccagcattaactatcaaagtcctaacagcagcactcttgtagagagaaactattaatcctgagctgcagaaaacaaacaaacaaacaaagacctgggttctccagatgatgagccaaaacaggtggattctgaaagaagagttaaggtgcaaaatggttgttaaatttggaatagcaagtcagccgtgtttctaattggagaacactcctaccgtgataaaaattcattaaagagtgagaaaagaatcctaaaaagtggtcaaataaaatatactagttacttttgatgttgctgtcaccaaatgcttgacaagaagcaacttggggaagggaagcttgtttgggcttagatttaagggagtgtagtcagtcacagtggggcaaccatggtagcaagagcagtttacagcggcctccatggaagctttctcacatctggatgggtcaagaatcagagagatcagaagcggtgctgggggatgcctggatacttgttgttggatatgcatcaccctatctagcaagcacctctgaattcaagaacaggcaggaggtactgcctggggcttggaagacctagcaaagaggggagaaggctatctaggaggaaagggcccagagacctgtgttcttctacattataagaaaggcaagggaccactgaggagcctgtggcctaagcaggatggaagaaagagtgaccctcgggccttacacatgccgaagctctccttttt

SEQ ID NO: 1087 - DNA, 4525 bp, Mus musculus
agcatttcctcattctctagaggacttctctgaagccacagaaattagaggtgatttttcccgggtgttgtagggcccactggcttcagggtgaaccctagtctccactcccacccctcaaaagaactgacctgaattccctaaaatccatctgttgtttttcatctcccatttttaagcaattaaaattaagctcccctaaatttcatgttgggaattttcttaaacccaacagcaacaacaaaccacctaacttctacaaattagtctaggattttgtgggttccccaagctttctaaccaagatattgggttcccctcgttaggcctggatcaagatgccccccatttttgcatagaataattttcctcattccccaacttggattctaatttttctggaatctcaaatttagtcattcgccacagttttcccatttatggagtcgccttcgagtccccctactttgggccgctcattcccaggaccgcaaatcagacaagggtctgacttgggatccccgaaatttgatcattgtttccgctggccactttcggcagcttcccgtcctgcgcataacagtggtatcggcctcgtcacttctcctacggtgtcccagcggcagcacagattttggaaaagtgtgtgtgccccaaacacgcactggacactgcgcggcggccaggacgtgggcagtgttgctcccgtgtccaggaaaacgactgggcattgcccccagtttcccccaaatttgggcattgtccccgggtcttccaacggactgggcgttgccccggttcactggggactgcccttggggtctcgctcaccttcagcagcgtccacttcagcagctcccacttcatccgctctcccgcccttctcctccgatcctcctgcgccagcggacccgaccttcggccttgtggtaccaatggggatcccagtggggaagtcgatgttggtgcttctcatctctttggccttcgccttgtgctgcatcgctgcttacggccccggagagactctgtgcggaggggagcttgttgacacgcttcagtttgtctgttcggaccgcggcttctacttcagcaggccttcaagccgtgccaaccgtcgcagccgtggcatcgtggaagagtgctgcttccgcagctgcgacctggccctcctggagacatactgtgccacccccgccaagtccgagagggacgtgtctacctctcaggccgtacttccggacgacttccccagataccccgtgggcaagttcttccaatatgacacctggagacagtccgcgggacgcctgcgcagaggcctgcctgccctcctgcgtgcccgccggggtcgcatgcttgccaaagagctcaaagagttcagagaggccaaacgtcatcgtcccctgatcgtgttaccacccaaagaccccgcccacgggggagcctcttcggagatgtccagcaaccatcagtgaatcaaattatgtggtaattctgcaatgtagtaccatcaatctgtgacctcctcttgagcagggacagttccatcacgtcccacactaagatctctctgctccactccctccccaggtttctccttacccacccccatgccccgcctccccacatcaggctgttccccttgccccacaccatcgggcaaggggatctcagcagttctaaaaaaccaaatttgattggctctaaacaacccaattgacaccccccaaattatatattcacattaaaaaaaactttaaaaactacagtccctttaaaaacaaattggcttttaagaaattccataactgataatctaaaaattaaataactaaagaaattaattggctaaaaacatactaaaaattaattggcttaaaaacaattggcaaaatcaaataattcggcgccccccccccttcatcttctttccatttggatctttagtcaaattggctaagacttggatcccagaacccaagaagaaaggaaggggacccaaaattttgcaggtggcatgtcattgcttcagtgccctctccttatcccaagcacctttagtgtaaagctggctgagaacaacaatagccgcccaaactctttcttcactggtcattccatcacaaatgtcccccatgtcaccaagggggctgggtgaaagaacccaaggagaagaacagaacatgaaaactggaaatagaacttaattggcacaagcccccagtcccaaaatctcacttttccctacctaccctaaaaagcacatgattatactcacacccacaggcattaacacacacatacacataacacatatgcacacacacacacacacacacacacacacacacacagaggtatgcacacccacataattggatgaaaacattgaaatggctgaacaacttcgatttgaaccacattccccaaaacaaggcccatcccaaatttcctgagcagtttgcatggtttgagctctcctcccaatccatctagtttctgctgctgcttattggctctatgtgtgaccaggctgctagttctgtctttctcagtgagggaggtgttctagcaaggctcaattccatctaagcacctgtccacatggtgagcccggtgctccccaaccacccccgccatgaggaccaatgactagccagtgtagaataagtttggccagataaggagatggcactgccaagtgatacatgctgcccaagtaacctgacccctagttgtgctcctgggaggaaagatctgggggacaacccctaccctgagcacacctatgggccatctttgtcagtctcctggggagcccccgctttttaggggctccccagagactcacactgatgtggggagtgtgggaagtctggcggttggaggggtgggtggggggcagtgggggctgggtggggggagctatgggtaggaagtggtcccagagaggttttaggtggaagaatcaggaggagtcacaggtcaacttgcagaattactgaagaattaggaccccaaattttatgccaattgatctattcccctctttttatttctggggccggttttttccttttttttttaatccctccttagctttttatgcgctcataatcaattgtacccattccctacataacgggagcagtgatcaggtaatgaatgcatcgagccatcaacaccagctagagccatcaacaccggctaccacaatgtcctgctctccacaaccttgatttttttttttatctctctctatcgcttggcctgagttgggagtggagtctctgtggggtgctggccacgcacccacagagaaataaaaggaattgagaaggtcgctacctggcctgacttctggggacagtggctggtccccagaagttctgaggagtggagggggcgtggggcagtgtcccctcaggtgttaggaaggtgctcggaggccacaaaagatggggctcccagctggccactgccagttgggggggaaggggatagagatgtgagagtagacaggttacatcaggcgggagcaagtggctgccttctgagcatttgggggagaacctctcccgtccctcagtgtcatcttgcccactcctcagcaccccaccttgcccccaggaggtctggagctctacagacctcctgggggcaaggtggggtgaggcccggagttggggaagctaggaggcttaaagcctacagagccaggagaactgtatacacggggtcatctgggccctggggcctgagggtctggcgagccgtagcagccactccacggtgcctaggactgcggcggggaacagggcggctggaggtttacctcacccccacttctgcttccagtgcagtccccctgcccaacagtccaactagcaatctagaggcctgaggcttctgggcccaggtgacaggactggcaccaccctgggggcggtgtgtgtcagccaagcatggcacagagggtccctcagcaagtgcctaaagaatgggccatttggaacattggacagaaactcaaagagtaaattgttataattggagactatgaattggcctggtatccaaaacatctcgaggcaccctaaattacctgcccatttggctggacacccacccagtgttaatatgcctcgtgggatgggtgctttcaggggcatttgctgaccaccctctgtgtccccacatttgcagttctccccatcataggtcaccttgatgcaggcacctccctggcctcctatgcctagtgtggccctccatcttgtctcttccctactgtcttcagtgggatcccctcttgggtccctccctttgtcatcatgtgaagacttcccacgcgtcgaacgccatatgtcacctgtgccactgtccatgtcatccagcagtggccccaggtgtttgcctcaactcagtccctctaacatgcattttctggcaaaatccaaagcttgggttttgtttttaacctgttaacgctcgcaaacctaataaagcatttaaaatacta

SEQ ID NO: 1088 - protein, 351 aa, Mus musculus
SFATVFPFMESPSSPPTLGRSFPGPQIRQGSDLGSPKFDHCFRWPLSAASRPAHNSGIGLVTSPTVSQRQHRFWKSVCAPNTHWTLRGGQDVGSVAPVSRKTTGHCPQFPPNLGIVPGSSNGLGVAPVHWGLPLGSRSPSAASTSAAPTSSALPPFSSDPPAPADPTFGLVVPMGIPVGKSMLVLLISLAFALCCIAAYGPGETLCGGELVDTLQFVCSDRGFYFSRPSSRANRRSRGIVEECCFRSCDLALLETYCATPAKSDVSTSQAVLPDDFPRYPVGKFFQYDTWRQSAGRLRRGLPALLRARRGRMLAKELKEFREAKRHRPLIVLPPKDPAHGGASSEMSSNHQ

SEQ ID NO: 1089 - DNA, 39533 bp, Homo sapiens
tgggctggggatggctgggcctggggctggcatgggctgtggctgcagaccactgccagcttgggcctcgaggccaggagctcaccctccagctggggacctggccactggggcagccctgttcctgaagctctgagctcaccccttccccatgaccacatcagcccccctccacccagagatgtcacagcccccagctagccccgcctccagagtgggggccaaggctgggcaggcgggtggacggccggacactggccccggaagaggagggaggcggtggctgggatcggcagcagccgtccatgggaacacccagccggccccactcgcacgggtagagacaggggcgccctgctggagctgaggtatgtgagctcgcgcggggctgggccaaagcggggcccggtgggccggctgggaggctgcccaccagtcagccatcggccaagctgttgccctggctgaccctgatggccaacaaggccgtagggagtgatgggcagaggccccttctgggaggggagggtcagtgctctgtgggggaccgtgtgttggagtggagggcagcaggaggagccctttggtgtccagggactcctggagctgccccagccttccaggacttgcagggcagctggcactggctggtgctgggggctgaggagtgtcttttgaggggccaaattttctgtgacttctgtcctgggggacctctgacctgaggcctcaggagagggcaaggccgcccacccaaaagagatgcagccatggttcgcggtgccctcggctgccctgggccagagctggggctagctttcaccttgttgagacccaggactctgtcccccaagcctgtcttcgccagcgccttgaccccacccctcatatactgtgtcctggaaaacgtggacacgggagaccacagccagggcgaggtatcgcccctccatccccccaggcccaatgagaagcagttggccaaggtgatccaggtggcagaggcagcatcagacccagtctcctgtcaggcaccaccttgggtgccggtccccagatgccctggcggggagtgtgcatgctcccggagcccccaggtcaccccatgtgagccaggcccacagagcttggctctgcaatgcctgctgggctgctgcccatgctccaccccttctgggaagctaaaagacagcccttcagtgtccagagacctgcctggccttggagcctgggtttcacatgcccaccgggctggcaggggcactcagctgcctccagccccggcggtcaccctggcattgggtccatctaactgctccccagtcacaaggcagctgctccccaagtctccccaaacctgctggcccctctagaagcctctgtccattcctggaggaccgagggcagcctgcatgccatcccgcacacagccttctgtctgggcatcctgccttcacacatgctgcacagggaggaaactcttataccacattccttaagcagagactgaagcctggagccaggcacatggcacgtgctcccacccacccaggacacactgcggtgtggctgcctccaggctggccccctagattgcgtctgctcctggcatggataactggcgcctttgcctggccgttggggcagtgtttgccttcccctgtcggcagcaaatatttactgtcctccgtctccaggactctccaggcctgagcagaccccggggggatgagtgtggactcagcggtgctgagggtagccccctgcccttcgggtcctggtgcccagcaggggtccagcccagggaagagactgaggccaggacaggcagtgtttaagcctgagtttctgggaaaggtagccctgggcagaacttgggccgaacgttggccagtgtctctctccagccaggctgtgaggtagctgtttccaggatgggcacctttccacacccagcaatgtggccaggagccgccattcacgggtgcgaccagcagatggcatcagagcctcacttttgatgcactccggccaccagccacgggtccaggttctggccaccacccagggtctgagcagctgcatcctgcccctgccgggcactcccgggggctgtggggcctgtgggggccctgccagacactcttgggggctgtggggggccctgccaggcactcccagggactatgggggctgtggggggccctgctgggcactctgaagggcatggggcttaggaatgagaggagctgtctgatgatgatggtgggggcactgcagaggcccccggcctgctcaggtccagtctcggcccctaagtcaagcctcaggccagcctctcaccagcctgggtttctcagagggccgggacaaatgttctgggtctctaatattccaagaaagcctctggctggactctgagccccacctgcgagcccctagaatcacagagagctagggtgagaagaccagggggactccgtcccaccctcgtcgtggctgagcccactgtggccggtggtggaccaggctgtggcctttgctgagggtccccagggcccctgggggctactgaggctggaggccagcggtggccaggagggtccctccctcagccactcaagccagaaggtcgagtcctggtttctatgtgaggagggggcttcaggggctgggacctgggggcaccgaaggcctggagctggggtccaggcggctgagggttagtgcgttcccacgctcccctccgccagcgccgtgaggagagggaggtccactctggaaagaatgtttgagggcaggggtagacagggtctgggaacgcggagatgacacactggggtgccgcctccgcaccctccgcccttcctcccactattgtttctggcctcggccgcaggaacagcaaggcagattccttcgaaagtggggccggccggaggcggcaccccatcgtccctctcgcggcccagccgtgctgtgctggcgccaagctccccgccggcctcccacgcgctcctccgcgtcctcagctcactcctctgctcccaggtggccccagtcctcaccccacctcgcttggactccccacttcctgcccatctgccgctgttgggagaccctctccctgaccccagggactgctgaggcagcctccaagcctcccagtgtccccgaggctgcccctagaagctggcttggggctgtaccaaaaggtcaccccacagtccccactccaaggcaggttgatagcagggatctcagggtgcccatggatcaaggactaagtcagagtcggggtccctcaggccgagggtaacgtaggtggtgcctgccaggctctcctcgcccaggggggctgagaatgtctaaacccgggtggctgtgacccctaggcagagccagcccagcccttgccagggatggagaccggcctcgaggaggccaagccctgggggtccacaggcctgtgggcttcggggaggctctgctccctgtggccctgtgtggcccaggctgctgagtcatcagaacctcgggggcgccgcgggccccacattccgcccaggcctctctctgacccccttcccagcccatctgtgtttttggaaaacagagccagagccccccgcggccctgccagcttgcggctgctcacgctgggactcaaatcgcacccttctgtcttcaaagtccaccttcacttcaaagctcggtcccaccccagcccggcctccacagggccaccacctgcccacacccaggcccgctgctgcccagtttcggagggaccttgggcatcccctgatcctctctagagcgcggggttcctggcatgggcccgttacacatgggtggctcggtgggtggtgaggacggggctgggagaagatcctggggaccccatggtggaggcaatgaggcacccaaaccccaactccagcgatggctgcttccacggggccctccgagccctgaccttcaaggtgcaagaaaagctttcaggggcaggggtgagtggaaggtgggcttcctcccttgccacctggggggcgggcccaggacagatgctccgtgagagcacttcccaacctaggcccagctgtggggaaggagggagcaggcggctgggctccaggcagggggaagagttgcctgagaactcagggagagagggagggctggggcaccccatgccagctccagctgcagcaccagagctcagagcagaggaggcaggagccagcaggctgggaggcttcctggaggaggtgtcccaggcccctgccagcactgcagccttgagcacgaggccacgctgggctcctgcttccagggccgcagacccagcccagcactgcccatgctgcccttgccagggacccttacagagctagcacctgggtccctccccctggctgggcatgggctggtctcgacaacaaagaaggggtagctgtggcctcaaggtctacaacaggttgtgatctgtgggtgccaagaagtcatgggccctcagcatcctcagggccagtgagtgtccacctgggccagtgtggggctgaagggtgagagctgagaggcggggctgacatcctggctctgctgccagtggctgtgtggccttgggaaagtcacttagcatctctgggccttggtttcctcatccatcagaagggaaccaaagaaggccctgcctgcctcagctgctggatggtgtagctcagtgttgtctgtgagaggcaggcccttcggcagccgcgcctctggcttcagtacacccgtgagctgctttctgtgcccaggccttcaaatcacggggacagccccgtgggtgtggttcaggtctgggcaccacaggcaaggggaagctgacatgtcctccgtgggaagtggcagtccccatggctaccgggcatgcacagggcgtgtggaagggaccttggagggaggagcagctcctcgagggaggagcccggggctggggtacggaggcctctgcacatcttagagtaaaacaagcaggagaggctgggtgcggtggctcatgcctataatcccagcactttaggaggctgaggcgggcagatcacctgaggtcgggagttcaagaccagcctgaccaacagggagaaaccccatctttactaaaactacaaaattagctgggtgtggtggcacatgcctgtaatcccagatattcgggaggctgaggcaggagaatcgcttgaacctgggaagcagaggttgcgctgagccgagatggcaccattgcactccagcctgggcaacgagagcgaaactccgtctcaaaaaaacaaaaacaaaaaaatcaaaacaatcaaaaaaacaagcaggaggggctctgaggtgcctgcaacacccaggtacaatccgtggccctgaggcccatcacagggaaggggtctttgcagctctttcaacccccagcccagcatccaaggaagcccagggcagggagaaacctcagctgcaccatcagagctcagaacagagaaggcagaaattagcagggagtggggctggggaggcttcctggaagacgtgtctcccgccttgctggcactgaggccttgaggatgggtccatactgggcccccactgccagggatgcagatccggcccactgctgaaatctgtgctcctggagcctccctcctgttcatgggccacaggctgtgaaaaccccagagtcctcccaggcagcaagttttgttttgttttttgtttgtttgcttgtttgttttttgagagtcttgctctgtcatccaggctggagtccaatggtgcgatctcagctcactgcaacccctgccagccagcaagttttgctggagcaggtggaggagtctttgcagcgagctcccgagctgcctaggcctgccgaagagttgctgagcacatgaccaccaaaaaaggtttcggcacctgtggacctgtgggtaggggaggcaggggcaaatgtcactttacgtcagggggaggataaaatcgaacgtttattaacattgattttgtgccagaggtggctacccagacccatccactgtagccgtgaggttggaagggagaggggaggcatgaactggtttgtccaaggtcgttggcagagcgcggctgtgaactgggttagcccccaggcccctcctgcccatccgtcctccaagcactgatgtgcgagtggcacagtggtccccttggccctgccagcccctcgggctgtggccctatagcctttgaaggacggcctcacttccccagcagaggcagcctggccttccagtacctcgatggtgtagggctctggggccacagtctggtgttttcaggactaggttgtgggttacttcctcctcttctctcaattcccaaggtttgttaagcggccctgtagctccggtcatggcaatatggatttactggcggtgctttctgaagctgtggatgcaattctcacaagtggccacatggtgtcaggctcgggccagattaggaaatctccgctttacaggtggagccgggtggggctggggaagcgagttaagaacgaaattcagcccatctgggctcatcctagggacgctgtctctgaaagggggtctcaacgttctgccccgggcctctcagtaatagatctcattttatgttcatgctaatgtggtggtttcctctcttagaacaaaacggatgcttcagaaaggtgttccagacctatcctgtggcttaggccctaagctttaggatgctcaccaggccacagccccctcgggttaggagacacccgaagggaggaattccctcagcgccccctctcagtcctgtaatgccgggacagaagcagataagagccccggttccaaacacaaaggtgcaggacccatggcaccctgacactgtagggaggcgtcctgactttgcccccagagtccccctccagagtgccccaaattgcggcgcccaagacctttgggttatgccactgtaattctagaaatggccgccaggtgtcagcagaaggccacttaagaagctaaatggcgaaagcttggtgtagcagatttctgggggttcccaagactctcatgcatgaacaggggtgggctgagcctctcccaggcctaagaggcagtggagcaaggaggtttttctatgtcgtgtccctcaatcctgcaccccagtttttgtccattttgcggtccctctcacctgtctccataaagcatgtgtcccccagacccttgcgtggaaaatctgtggaatgtagtgctgtggggccacagccctcacaccccaactcactgatccccaatgcctctagtcctgcctcggtggcaccatggcttagctgctccccgggggccctttctatcctgaccgcttctccctgctctccttctcctgtttacacaccctgggttccaagatcctgatgggataaaatagccttggagactagagtgagctcctcctgggcccatccagagatggaattccagtccagggcagagtttggattcaagacaccattgtgggcctgggaggctccaggtttccaggagtttgacctgtgggctgcttccctttcagccccatagctgcccacctcctcaacctggggactgttcatttgggggggcatcccatggaatcacttcatctggctgggtgtcagcccgtcactctctctaggtccatctgcagcttggaaagtcccagccaagtgtctccagagggctctggcagtcgctgtttgcaacatttgggcatcttgcagcagacactgggaccagcacatgctacggggtctctaagccatagagccccggagcaagggctgcttcatgctgacctccttgtatctttgttttgtttctttccctgagtctttgttttgtgccttctcttcctgcaggcttgaggaggaggtgtcaaattcccagtaagacttgatctaatccaatgggtgattctatctgagccctccctgagctgctgccagctctgagtctgtgctttagctggaaagactgtgaacccattcagtgctctggacctgacagggccattaacatccctccccacccaaaagccgagtgaaaaatcccattttccctcctcccatgggagggcatggctctggggcatctacgtcttatttgagacatcccccaacacatgccagatttgaatccccttcaagtctaactctcttccctgctgaaatccttgttgtccccactagatgtcctattcctccagctaatgaagggatttaagacgagggcttgaaagaaaaagggagaggggacaattaaatcccaacacaggctagtaaaactaatcacactgaaggtggttggggtgcgtgggtgttggagggggggactggtggctctctggaaagtacacgtctttgcctcttcctgagtctttgctagcttggggaagaggttagaaatttccagtgtgatttagtccaatctggtggatgcttctatatgaaccctcacccagctgctgtcagctttgagtctgtgctttaattagaaaggctgcgaacctgtccaatcgcccaatccagaaatgcctgcaagtgccccctgcagcagtgtcattagagcttagtaccacacagggagtgtctgaggtcagatcagacgtgaccagtgaagtgaaaaaccccccagctgagtaccttgctcatggaagatggaaggacataactgcacagtacataactgtaccgggagcacctaaaatccaatttttctgctgattcttgaaccctgctttgtcccccttattccccccccccccccgccattttaccagtgccacgtccaccaacattccagggtgtcaagtaactgccaagtgtcactctaagtaaagctacacccactccccaccacctccacatagcccccacctcctagctggcagggagcttctggcttatgcccacgcccacaggcgcctttctgccaggtcaggggtgggccaaacctccacccgctaatgtaccatgccctggtgctggaaagtgcctgagccagctgccccagcggcctcggcactaccaagttggcacaaagctccccaaattcggaggggctcagggaaacgagtggaggggatgaggaggtgaggggtaaacccatcatttcagttggcatttgagcaggtgccatgctcagcggagatgaggctctcccatctgtaggggccgtattaacatgcacactctaaaagtgcccttcgtttctccagcctcagctttgtccctctcctcctccacgtcaacctggccagagggtctggacgccacagccagggcaccccctgctttggtggtgactgctaatattggccaggccggcggatcatcgtccaggcagtttcggcagagagccttgggcaccagtgactccccggtcctctttatccactgtccaggagctgcggggactgcgcagggactagagtacaggtaactgggctcccatcccttgagtgtgagagaaaagctgcactttaagtgttcaggcgtgggtgggccgggagcttggggcagctgccaggatcctggtttctgaaggaggggaagaacttctgctgctggagggtgcagggaagcctcctgagagcagcctcaacttcagggatggggtgtgcaggaaaggccattgtggagagggttctcctttagggctgcacaaagccactgaggcttttgcaaggaaaataggttttccttgactaattcaccaagcaaaatgggaggggtaggggaggagggctaggccgctcttcccagcgggaacacacagctgtcttcacaagtgtgaaaggaagagtctttctgtgtgaaaagtttcctcccgttgcatcccccatcccattcccagagacaaacaggagactttgcagaggagccgggggcccgagattctggcgcagatattttatttatacatatatacaccattttacaggtaaagcttccttccctcctgcctccctatgcctgctgaccaccagcaagaaattggacaggagactgaggagaaacgccgggagaggcaacaaccgccctccatgtcccccctaggtttagcttctctcctcctgatggcgcacctggtcccccttgctgctctcccagcctccctggcacagagaggcgccctggggccaaggcagtttccctgggaatgctcattcatgcatgaagtttttctctgttgcaccctggacccagactcctcaatccacccagggtggtgtctgtggggagggggttcacttccccaggaagcacagccacgccgtccctcactggcctcgtcaagcagagctgtgtgtccagtggcttttgctggggccccctccttatctccttccaaggtgggggtgtttggaggtggaggaggctttcatattccgtgccatgacccctcaaggcgggccattcgtgtgcaccctccacccccagtgccaggcagaagcccatcctcacccaggaacagggcagcctgtccaacagaagggtctcggcctctccatcagcaccgggaagccctttctaggcaaacttctcaccacttcttccctcccttatactttgaaagagggagctctaggcaggggaggggctagagggggaagccgctgcccagatcctgacaaggtgacctgaaggaacccggggagggggatgggacagggctcaggcttggggtgtatggggaggggggctttgcttttaaaagaggtcatctcagcaatatctttttgtttttccccaggggccgaagagtcaccaccgagcttgtgtgggaggaggtggattccagcccccagccccagggctctgaatcgctgccagctcagccccctgcccagcctgccccacagcctgagccccagcaggccagagagcccagtcctgaggtgagctgctgtggcctgtggcccaggcgaccccagcgctcccagaactgaggctggcagccagccccagcctcagccccaactgcgaggcagagaggtgagtgtctcaggcaccctgaggcctggcagagagggccacaggctctgcgcgggagtcttcgaactgggatctcccccttctgcaagcagctttggctcagagaggctggcgtggattcagtcacacagctgggatctggagttccgtggttggctccaggtgcttccgtctaggggccagagcaggtgtgggcagagcaggttccccgcagtctccacggcaccgaggtcctggcaggggagctcctgggagacgaaagagggcaaagaaggggagaggggcagggagagagcgggcagccaaaggggagaagatggggggcagaaagtgggtagagagggaaaaagggaaaatatcattggggaagaacctaaaaacccaaggaaagctgggctctgctgggggctgtgagacccccgggttctccccgccccaggctgctggccatggggtcttgcaccaatggcctgacctttctgtcggtctgtatttatcaaagtgggtgacagtctcaggcctcctggctgttcagaattgaggtaataaccagaggccttctgagcaaagggcctaaggggctccggcgtcaggatcccattgtggtcaggagcctgcggggcttcccgtgtgcaagaggggtgaaaggtggctagaaaggcccagccagtggcctctgcctcagccagagggagctctgtagtgggggcagcacccattcactggtcaggcactggggtgacaggggaggctccaggacttggggagcgttggagctggaggcacatggattggagtccctgtacctgccccacgacagggcctgcagggagggatccagcaggtgactcttcaggctgatttgcccatcccagatagaagccgggagtgttctttcaaaggtgtctttaccttagacactcaataaaatggtaacacagtggcgccgcctcagtcctttggagtgtgcaccgtctgaacccctctcccagggccctctcccaagcaccccaacctggacccatatcccccacgtacttttggctttgggcagattgagcagccttggggtggtctgtgctgtctggtgtggagggttgcagttcgggtccttagtcctacttcccaggccggccgggctgacgccagcgagtgtgtccttccccagcgaggggagcgagcgcaaggtcagcgcctcgtctgcggcgccctgcagggggtgacggaggggcgctctgaggacccttggagacaggagctgggtttgtaaaatgctgggcttggtcccacggacggcggagcggtgagctcagagccagagctggggaggaaatgggaatgagaaaggcccacttcagggctggtgagcgaggggatggggagcagccacaggccgaggctggggcatgggccaggctccatggggtgagtctgagtccttgaggggatgttcatcctctgtggaatgtgggtttgccagtggagaggagaccagcgttgccctggtgaggtgctggttcagggctggggggcggacgctgcttggggctaaagttcctgccggccaagctctgggtgggaggagaccctggccccctcccaacacccttggactgctggcgggacccttcctacctccgggggctggaagtagtgggggaggagccagtcttgaggaagaaccccgatgctggtcttgactagaggggagccggtgtgcttttcgagcctcagggtgacccgcgtctgccccagcctccagcctgccctggtcacttctgactaaataaggagagcactcagcaggcagccccacgagggagggggaacatgtgtgcacccccactcccccacctgctcctccctccctacagggccactacaccctgctgtgggcaccccaaggtgaccctcagccttcttcctaccttaaaaagtccaggcatgcgttttcaagcatgagcggtggccccctgggggaaggcacctcggcagggcagaacaaagggaagggacccccaaacaggtcactggtgtaattgtccccagcacccccaaagaggaggagaacccacaactcggaactggggctcacccccgatgcccaacctgtccccagcctgggaagcaggcgtggaggagaaggtggggggagcctagagctggccctgggggccctggttttgtccatgacgggagcctcggcaacctagtccgctctcccggggaccaggtttgcagacaggcacctttcaaatgctcctcacccccaaatttacaagtcaccctgcagaggaaaacatcaacacagccaggggttctctgctggaggctcccccttctataggcacagccggagaggccagagagctggggacacggggaggctgcagaaggctggtgggaaggggggcagtgatgggtggggagagatgggccagatgttcttggaatgggacatgggggtgattgatgcagacagaaatttgaaggggacattcccacgtgtcttgttctgtgggtggaaaatgggctgtttttcatggtgggggcgggttctccctgtcttgccaagctaatgtgaaagagatgcctcatcctgcccagctccccacacctgtccaaggccattaacttctgcctccccagtgtcaggctttgagatgccccccttctagccggggtcctcctatggggtgacaatggggacaagcaatgcccactgtagttgccccaggatcccccaccattctgctggtccccagcggtgccccctctctggcagtacccccacccaccccacaggtccccttagggccactgccccatcgcccgacattgcccaacgccaaggggtgaccttgttcctgccgacagggccgttgggcgcctgcatgcgggtttaatatttgcctataaggaactgggctttccccagccggagtggacagactttccctgaaaattcgcttggagagaacgaaaagagacccctggcaccccagcggcgtgcagccctgcacccccctcctcccgggccccgtgtttctcattttcctccccacttcctctgctcttcagtgttacccaaacaaaactggtttcacccttgtttggtgctggcgaaggcccgaacggcgcgcgcaaagctccggggcaggccggaggtggccaccggggtgctccgggcccccaagccaagccggggactagcctgcccccggtggcggctcggccgcggcttcgcctaggctcgcagcgcggaggcgagtggggcgcagtggcgagggggagcctgcggacctcccacgcggggaccgagcaggtatctgggagtcccgggagcgcccgggaagcagcgtcctggtcgctccctcgcggcccttgggtttcttccttacacccggacgcccgctaagctcgggctgccgccacaaacgcgctctccgtgtggagaaggcaaagaaaaaaaaaataaaagcaaaaggaagaaaaaccccaaagaacgaaaagcagaatttcagccggccgtgcgcgccagggcgctccgcgctacctgcccgcgccgcccgcgctcgggttcccggggagggcgccagtgctccgcgcgcgccccagccaaggtgaatccccggcagcgccttccttccgctgcccgggaagcttgagctcaacaattagcccttgatcctcgggggattccaatccacggaacaacttccctgctttccccgaactcggacattttactttttctgggatcctctaaatttaagcattgcttcccaagtcttctaaatatattcaccatttcgacgggtcacaataattttcttggacgttaatttccggggacgtcaaaacacatcagtcccggcgggcttttccagacttacactatgtggcctggggccccagatgtgctttctcccaggctctggacagttttatacaccccctccaggtcccacagatttacaggccactaacccgggttccctaattttaaagacgaagcccttggtccgtggtggtcgcgctgaccaatttgcctggctccccaggatgtggacagtgccttttccacatttaggcattgtttccaaaacaagtggaactttcccgcataattttgaatattaactccagggtctcctaagcttactgtttcccgcacacgtccgccccattccgcgcccccccaccccacccccgcgccccttcccgttcacctcagcatgggacatttgctgttgggtcccgcaaatctattcacactaacctgggttccctaaactttacacgttgaatcccaagtccctcatgacactcagcagggctggaaggttggaaccctcagagtatgaaaattgcttcccataccttcccccaaattcggtcattacacccagagcatgttgaatccttttctgaatcataaacgacctgccctctgattgcctgagtttcataaaatggagggatttccccagtgattccccaaagctattgagaatgttgtgggtgtgtgagtcacaaagctttggggcattaacgtctatggctctatatgctgcctggccacgaatcaggtcccttaagatgtagacagtgccacccaggtccctggagcacactgagcagttaccaggaggtgctcaagtgtgacccaggattctccaggtccccccaaatcacacagggtctcccgggtccctctgggctacaccaagcacaaaaggaccccttgggcagagcctacttttatttctgttatgccaggtgttgctaacggccccagttcccaaacattccgagcactttctctgcatcacaacatattgactattaaacaattctctgggtcccaggagcttcataacaagaatcttgcttttctaaaattcaggcattggtctgaaaccccaacggccaggatcacactggacccttttcctggtcccccatacttggatgttctggacgctgccctccaggccctctaggaacattcagcattgccctcggatcacaggacagcactgatttcttgggctccaaacaacccactgagtcatctcaaagttaagcaatatttccttcaaacacactgcacactccctatcacaaaatctgaaaattcctaagtcctaagacctaggaattctgaatcccctttctttaaaatgtacatatggacccccaagtcctccaaggactctgagcaacttccctagatctttagattcaaaaacgattttcctggagcccccaaattgcggtattgtctcccagccttccaaagcaaattgagatttttttcccttcacaaaacaattgaggtttttttttttttaatactgatttatgagtctcctgactttatggtccctgccctgggtccccctacatttagaaaatgttccatggacccccaaagcacactaaaaaatgtccctgggtcccaagaaatcccaggcatggaaaaacctgcgacctataagtttcctagctactaactaggtttccagaaatttagatatcaaatctccattgggtaatttccatgtgtcccaaaaacttgaaatgtgtttcactggggctcccccaaatgcagacgacatccaggaaaatatatagtctttttcttatttaccaaaaataagctaatggaaatcatttacaaattagcatagaaaaataatactgattttttatttttttattttttattttgctttccccaaatgtactgatcacactccaggctcccccaaaatctagacagtgctttcttccatctctgaagggtgttaaaacctttccctgaagccacagtaattatgaaggttattttttccccggctgctgccagcgtccaggccactaacttatattcttaagatgtgaaaattaatctcagcttccccctaacacaccaagaatgtgtttggatccccaaaatgtgttccttgctttcatctgccaattttacgtaatatggctctacggcaaaattcccaatttcatatggagaattttctttaactacccctcctcacaaattggtcccccaagctagctggcccctatttgagacctctttctctatgttcccaattgcatggagcaacttctctcatcccccaaacctgtaatctatttttctggagtctcgagtttagtcattaatcacggttcccacattaacggagtccccggggtcccctcctccaggacacccattcgctaagcccgcaaggcagaaagaactctgccttgcgttccccaaaatttgggcattgttcccggctcgccggccacccactgcagcttccccaaccccgcgcacagcgggcactggtttcgggcctctctgtctcctacgaagtccccagagcaactcggatttgggaaatttctctctagcgttgcccaaacacacttgggtcggccgcgcgccctcaggacgtggacagggagggcttccccgtgtccaggaaagcgaccgggcattgcccccagtctcccccaaatttgggcattgtccccgggtcttccaacggactgggcgttgctcccggacactgaggactggccccggggtctcgctcaccttcagcagcgtccaccgcctgccacagagcgttcgatcgctcgctgcctgagctcctggtgcgcccgcggacgcagcctccagcttcgcggtgagctccccgccgcgccgatcccctccgcctctgcgcccctgaccggctctcggcccgcatctgctgctgtcccgccggtgctggcgctcgtctccggctgccgccggggaggccggcgtggggcgcgggacacggctgcggacttgcggctggcggctgcgctcgctcctgctgggcgccccgaaatccgcgccactttcgtttgctcattgcaaagatctcattcgtggggaaagcggctggagggtcccaaagtggggcgggcagggggctggggcgagggacgcggaggagaggcgctcccgccgggcggtaaagtgcctctagcccgcgggcctaggactccgccgggaggcgcgcgcggagcgcgggcgaagtgattgatggcggagcgaggggggcgaggggggccaggggggcgcgagattccgccggcggccccttccccttggctaggcttaggcggcggggggctggcggggtgcgggattttgtgcgtggtttttgacttggtaaaaatcacagtgctttcttacatcgttcaaactctccaggagatggtttccccagacccccaaattatcgtggtggcccccgagaccgaactcgcgtctatgcaagtccaacgcactgaggacggggtaaccattatccagatattttgggtgggccgcaaaggcgagctacttagacgcaccccggtgagctcggccatgcaggtaggatttgagctgtgtttcccgccctgatcctctctcctctggcggccggagcctccgtaggctccaagcctggcccagattcggcccggcgcagccggccttccgcgcgtcccgcacctggcgggggctccggggctccggcgcggcaccggggggcgctcgggatctggctgaggctccaagcgccgcgtggccggctcctcctgctggggcaggtggcggctgcgcgccccgcccgagcccaggggccccctcagccgcaacaaccagcaaggaccccccgactcagccccaagccacctgcatctgcactcagacggggcgcacccgcagtgcagcctcctggtggggcgctgggagcccgcctgcccctgcctgcccggagaccccagctcacgagcacaggccgcccgggcaccccagaaacccgggatggggcccctgaattctctagaacgggcattcagcatggccttggcgctctgcggctccctgccccccacccagcctcgcccccgcgcaccccccagcccctgcgaccgccgcccccccccccggggccccagggcccccagcccgcaccccccgccccgctcttggctcgggttgcgggggcgggccgggggcggggcgagggctccgcgggcgcccattggcgcgggcgcgaggccagcgaggcccgcgcgggccctgggccgcgggctggcgcgactataagagccgggcgtgggcgcccgcagttcgcctgctctccggcggagctgcgtgaggcccggccggccccggccccccccttccggccgcccccgcctcctggcccacgcctgcccgcgctctgcccaccagcgcctccatcgggcaaggcggccccgcgtcgacgccgcccgctgcctcgctgctgactcccgtcccgggcgccgtccgcggggtcgcgctccgccgggcctgcggattccccgccgcctcctcttcatctacctcaactccccccatccccgcttcgcccgaggaggcggttccccccgcaggcagtccggctcgcaggccgccggcgttgtcaccccccccgcgctccccctccagccctccccccggcgcgcagcctcgggccgctcccctttccgcgctgcgtcccggagcggccccggtgccgccaccgcctgtccccctcccgaggcccgggctcgcgacggcagagggctccgtcggcccaaaccgagctgggcgcccgcggtccgggtgcagcctccactccgccccccagtcaccgcctcccccggcccctcgacgtggcgcccttccctccgcttctctgtgctccccgcgcccctcttggcgtctggccccggcccccgctctttctcccgcaaccttcccttcgctccctcccgtcccccccagctcctagcctccgactccctccccccctcacgcccgccctctcgccttcgccgaaccaaagtggattaattacacgctttctgtttctctccgtgctgttctctcccgctgtgcgcctgcccgcctctcgctgtcctctctccccctcgccctctcttcggcccccccctttcacgttcactctgtctctcccactatctctgcccccctctatccttgatacaacagctgacctcatttcccgataccttttcccccccgaaaagtacaacatctggcccgccccagcccgaagacagcccgtcctccctggacaatcagacgaattctccccccccccccaaaaaaaagccatccccccgctctgccccgtcgcacattcggcccccgcgactcggccagagcggcgctggcagaggagtgtccggcaggagggccaacgcccgctgttcggtttgcgacacgcagcagggaggtgggcggcagcgtcgccggcttccaggtaagcggcgtgtgcgggccgggccggggccggggctggggcggcgcgggcttgcgccggacgcccggcccttcctccgcccgctcccggcccggggcctgcggggctcggcggggcggctgagcccgggggggaggaggaggaggaggaggaggacggacggctgcgggtcccgttccctgcgcggagccccgcgctcaccctggcggctgagctgggggtggggtgggggcgtcgggaagggccgagggaggtgtgaggtgtctgcaggggcgacttcccggtcggtctgtgggtgcagggggtgccgcctcacatgtgtgattcgtgccttgcgggccctggcctccggggtgctgggtaacgaggaggggcgcggagccgcagaagcccaccctggtatgttgacgcggtgccagcgagaccgcgagaggaagacgggggtgggcggggccaggatggagaggggccgagttggcaggagtcatggcagacgccacattcgcgacatctcccccacaccccctctggctctgtccgcaacatttccaaacaggagtcccgggagagggggagaggggctgctggtctgaggctaagaagggcagagccttcgacccggagagaggccgcggcccctgcccagtgggcagcgtggaagtttccatacaaggaggtgggaaggagacccccccccccttcactgccctgtgcagagatgagccgggggtgcaggatgggagcccatggcacttcgctacgggatggtccagggctcccggttgggggtgcaggagagaagagactggctgggaggagggagagggcgggagcaaaggcgcgggggagtggtcagcagggagaggggtggggggtagggtggagcccgggctgggaggagtcggctcacacataaaagctgaggcactgaccagcctgcaaactggacattagcttctcctgtgaaagagacttccagcttcctcctcctcctcttcctcctcctcctcctgccccagcgagccttctgctgagctgtaggtaaccagggctgtggagtgaggacccccgctgccatcccactccagcctgaggcagggcagcagggggcacggcccacgcctgggcctcgggccctgcagccgccagcccgctgcctctcggacagcacccccctcccctcttttcctctgcccctgcccccacctggtctctgctccctcacctgctccttccctttctgttccttcccttcggccccctccttgcccagctcagggcttttcctgggccctcacctgctccgcaccgctgcatgcttcctgtcctgctttctgccggtcccctgacccggacctccaagttcagagtggtggggcttgttgcggaagcgcggcgagggctagagtggccagctggcggagtgtgctcttagaatttggaagggggtggcagagggggcggtgagaggactggccagggtccagtcaaggagatgaccaaggaggctttcagatcctcggcgcagctgcccactagtctttagagagggcatgcaaagttgtgcttctgtcccactgcctgctcagtcgctcacataatttattgcatcaaaaactcccctgggtctgcggagcgaaggctggggctgcccgcctggagggttccaccttctgcaggggcagggccaacttgctgtggtggctcccggcctcccacccccgagtgggttaacccggccctgtggccctgcagcctgtggagggggtgtgtcctaagactggcctccccttccagattgtagtctggggaacctggtgtcggacttcccaggtggcctgagctggtctctccagctcccacggggagagtttggtagcgcaaatagggagatgttctggaggcccctggccttactggttcgatttgaggcctggaaaggaggctctgggcgtgtgtgtgtgtgtttgggggtacccaaggcagactggagttggagaactgggtgactgggaaaacaaggtttctagagcatgggtggcgtggttgtgttaaccattggagtccttgacccaggcctggctcagctgcagactggaaaggtggaaaagccagggggaggggcggggctggcccagcaggactggcctgctgctttgagggcgatggtcctcctggaccccccctgctcagctgggggttgtggggaggaagggactggtcctcctggatgcacatgctctgtaggggtggggctgtctgccatcttggctggcgctggaggcctgagaagtggcgatgtgacgctgggctggccctgcccccatggtgtcataggacggaggccaggtcgggtgtccagcctgggcccctgcagctgtggatgccgctgagctcctgcaataatgaccgtgcagatggtcacccctcgtgtaaaattactagtgcttcttgcaaatggaaggaactgggccttttctgtgtgcttctggacgcttcattctgcacatggccctgcgccctcacctcggcattatgacctgtgtgttacttttgtaataaaaataatgtttataggaaagccgtgctttcaattttcaactgaatttgtaggttggcaaatttggtttgggaggggcacctctggcctggggcttggcctggctgccccgctcacgccacttctctcccgcccccagacaccaatgggaatcccaatggggaagtcgatgctggtgcttctcaccttcttggccttcgcctcgtgctgcattgctgcttaccgccccagtgagaccctgtgcggcggggagctggtggacaccctccagttcgtctgtggggaccgcggcttctacttcagtaagtagctgggaggggcttcctcagacctggtcaggcccctagagtgaccggtgaggatcgcccaacctcaagccaggggagcacactcctaggtcagcagcccagccgcttgctctgagactttgaccttcccgccgcgtttctgagcacgtgcggtgtcccagggcatccacaccagctgcctttcccatcacacgcctccttcgaagggtgggccagaggtgccccctagacgtcaggggcactcacaggggtctccctgggcatcagaatttctgttgggggccgtgaggctcctgctcctgaggcaccgcacgcctagtgcagggcttcaggctctggaggaagagcctgcctttcttcctgcaccttttggacattctgacaagggacgtgcgttcggtgaatgatcagaattaaaatcaataaagtgatttatataattaaaatcaataagacaagtgcagttggtgggtggcaggggtgagcggtgcatgcgcctccttgggccccaaggctgccgtggggggtgcccacctgctgacctcaaggacgcttcagcctttcctcatgtttctctcttggttctccagcctgggggctggcaggtgggtgcatggcccattgtccttgagaccccacccccagataggggggctgggtggatgcagaggcaggcatggtgcctgggcatgcctgatggggcaggggaggggccgctccttactggcagaggccgcacggcttattccacctgacactcaccacgtgacatctttaccaccactgcttactcacgctgtgaaatgggctcacaggatgcaaatgcacttcaaagcttctctctgaaaagttcctgctgcttgactctggaagcccctgcccgccctggcctctcctgtgccctctctcttgcctgccccatttgggggtaggaagtggcactgcagggcctggtgccagccagtccttgcccagggagaagcttccctgcaccaggctttcctgagaggaggggagggccaagcccccacttgggggacccccgtgatggggctcctgctccctcctccggctgatggcacctgccctttggcaccccaaggtggagcccccagcgaccttccccttccagctgagcattgctgtgggggagagggggaagacgggaggaaagaagggagtggttccatcacgcctcctcactcctctcctcccgtcttctcctctcctgcccttgtctccctgtctcagcagctccaggggtggtgtgggcccctccagcctcctaggtggtgccaggccagagtccaagctcagggacagcagtccctcctgtgggggcccctgaactgggctcacatcccacacattttccaaaccactcccattgtgagcctttggtcctggtggtgtccctctggttgtgggaccaagagcttgtgcccatttttcatctgaggaaggaggcagcagaggccacgggctggtctgggtcccactcacctcccctctcacctctcttcttcctgggacgcctctgcctgccagctctcacttccctcccctgacccgcagggtggctgcgtccttccagggcctggcctgagggcaggggtggtttgctcccccttcagcctccgggggctggggtcagtgcggtgctaacacggctctctctgtgctgtgggacttccaggcaggcccgcaagccgtgtgagccgtcgcagccgtggcatcgttgaggagtgctgtttccgcagctgtgacctggccctcctggagacgtactgtgctacccccgccaagtccgagagggacgtgtcgacccctccgaccgtgcttccggtgagggtcctgggcccctttcccactctctagagacagagaaatagggcttcgggcgcccagcgtttcctgtggcctctgggacctcttggccagggacaaggacccgtgacttccttgcttgctgtgtggcccgggagcagctcagacgctggctccttctgtccctctgcccgtggacattagctcaagtcactgatcagtcacaggggtggcctgtcaggtcaggcgggcggctcaggcggaagagcgtggagagcaggcacctgctgaccagccccttcccctcccaggacaacttccccagataccccgtgggcaagttcttccaatatgacacctggaagcagtccacccagcgcctgcgcaggggcctgcctgccctcctgcgtgcccgccggggtcacgtgctcgccaaggagctcgaggcgttcagggaggccaaacgtcaccgtcccctgattgctctacccacccaagaccccgcccacgggggcgcccccccagagatggccagcaatcggaagtgagcaaaactgccgcaagtctgcagcccggcgccaccatcctgcagcctcctcctgaccacggacgtttccatcaggttccatcccgaaaatctctcggttccacgtccccctggggcttctcctgacccagtccccgtgccccgcctccccgaaacaggctactctcctcggccccctccatcgggctgaggaagcacagcagcatcttcaaacatgtacaaaatcgattggctttaaacacccttcacataccctccccccaaattatccccaattatccccacacataaaaaatcaaaacattaaactaacccccttcccccccccccacaacaaccctcttaaaactaattggctttttagaaacaccccacaaaagctcagaaattggctttaaaaaaaacaaccaccaaaaaaaatcaattggctaaaaaaaaaaagtattaaaaacgaattggctgagaaacaattggcaaaataaaggaatttggcactccccacccccctctttctcttctcccttggactttgagtcaaattggcctggacttgagtccctgaaccagcaaagagaaaagaagggccccagaaatcacaggtgggcacgtcgctgctaccgccatctcccttctcacgggaattttcagggtaaactggccatccgaaaatagcaacaacccagactggctcctcactcccttttccatcactaaaaatcacagagcagtcagagggacccagtaagaccaaaggaggggaggacagagcatgaaaaccaaaatccatgcaaatgaaatgtaattggcacgaccctcacccccaaatcttacatctcaattcccatcctaaaaagcactcatactttatgcatccccgcagctacacacacacaacacacagcacacgcatgaacacagcacacacacgagcacagcacacacacgagcatacagcacacacacaaacgcacagcacacacagcacacagatgagcacacagcacacacacaaacgcacagcacacacacgcacacacatgcacacacagcacacaaacgcacggcacacacacgcacacacatgcacacacagcacacacgcaaacgcacagcacacacaaacgcacagcacacacgcacacacagcacacacacgagcacacagcacacaaacgcacagcacacgcacacacatgcacacacagcacacacactagcacacagcacacacacaaagacacagcacacacatgcacacacagcacacacacgcgaacacagcacacacgaacacagcacacacagcacacacacaaacacagcacacacatgcacacagcacatgcacacacagcacacacatgaacacagcacacagcacacacatgcacacagcacacacgcatgcacagcacacatgaacacagcacacacaaacacacagcacacacatgcacacacagcacacacactcatgcgcagcacatacatgaacacagctcacagcacacaaacacgcagcacacacgttgcacacgcaagcacccacctgcacacacacatgcgcacacacacgcacacccccacaaaattggatgaaaacaataagcatatctaagcaactacgatatctgtatggatcaggccaaagtcccgctaagattctccaatgttttcatggtctgagcccccctcctgttcccatctccactgcccctcggccctgtctgtgccctgcctctcagaggagggggctcagatggtgcggcctgagtgtgcggccggcggcatttgggatacacccgtagggtgggcggggtgtgtcccaggcctaattccatctttccaccatgacagagatgcccttgtgaggctggcctccttggcgcctgtccccacggcccccgcagcgtgagccacgatgctccccataccccacccattcccgatacaccttacttactgtgtgttggcccagccagagtgaggaaggagtttggccacattggagatggcggtagctgagcagacatgcccccacgagtagcctgactccctggtgtgctcctggaaggaagatcttggggacccccccaccggagcacacctagggatcatctttgcccgtctcctggggaccccccaagaaatgtggagtcctcgggggccgtgcactgatgcggggagtgtgggaagtctggcggttggaggggtgggtggggggcagtgggggctgggcggggggagttctggggtaggaagtggtcccgggagattttggatggaaaagtcaggaggattgacagcagacttgcagaattacatagagaaattaggaacccccaaatttcatgtcaattgatctattccccctctttgtttcttggggcatttttccttttttttttttttttgttttttttttacccctccttagctttatgcgctcagaaaccaaattaaaccccccccccatgtaacaggggggcagtgacaaaagcaagaacgcacgaagccagcctggagaccaccacgtcctgccccccgccatttatcgccctgattggattttgtttttcatctgtccctgttgcttgggttgagttgagggtggagcctcctggggggcactggccactgagcccccttggagaagtcagaggggagtggagaaggccactgtccggcctggcttctggggacagtggctggtccccagaagtcctgagggcggaggggggggttgggcagggtctcctcaggtgtcaggagggtgctcggaggccacaggagggggctcctggctggcctgaggctggccggaggggaaggggctagcaggtgtgtaaacagagggttccatcaggctggggcagggtggccgccttccgcacacttgaggaaccctcccctctccctcggtgacatcttgcccgcccctcagcaccctgccttgtctccaggaggtccgaagctctgtgggacctcttgggggcaaggtggggtgaggccggggagtagggaggtcaggcgggtctgagcccacagagcaggagagctgccaggtctgcccatcgaccaggttgcttgggccccggagcccacgggtctggtgatgccatagcagccaccaccgcggcgcctagggctgcggcagggactcggcctctgggaggtttacctcgcccccacttgtgcccccagctcagcccccctgcacgcagcccgactagcagtctagaggcctgaggcttctgggtcctggtgacggggctggcatgaccccgggggtcgtccatgccagtccgcctcagtcgcagagggtccctcggcaagcgccctgtgagtgggccattcggaacattggacagaagcccaaagagccaaattgtcacaattgtggaacccacattggcctgagatccaaaacgcttcgaggcaccccaaattacctgcccattcgtcaggacacccacccacccagtgttatattctgcctcgccggagtgggtgttcccgggggcacttgccgaccagccccttgcgtccccaggtttgcagctctcccctgggccactaaccatcctggcccgggctgcctgtctgacctccgtgcctagtcgtggctctccatcttgtctcctccccgtgtccccaatgtcttcagtggggggccccctcttgggtcccctcctctgccatcacctgaagacccccacgccaaacactgaatgtcacctgtgcctgccgcctcggtccaccttgcggcccgtgtttgactcaactcagctcctttaacgctaatatttccggcaaaatcccatgcttgggttttgtctttaaccttgtaacgcttgcaatcccaataaagcattaaaagtcatgatcttctgagtgttccactctctgacttgggtactggactgccggagggagggaaggggctgagcacctggaagcaggcagagggggatagaagagggaaggggaaggaaggccttaggggtgtggacacctctctccgtcccctgatcacatacatggagaaatgagagagctggaagccagactctcagactcactgtcgtgcacctgaagccagggggtctgggacagtgtcaggcaccaagttctcaaagatgggggtgccacgaagggtaggagcctggggggctttttcagagaaaaagcaaagtaccatcagtaccaactccagggaatgcctcccccaccaacagccttagaggactggggctgggcaacctctaaaaggttctggaaaccgtatctgtggctggagatgggggctcagggccactctcacccagggactcagcccccttccaaggttgaggctgcccagatgtcattagtaccactgcctcctgccagggctcagcctgtacccacctgtcccaagggtgctggcctctagctttcaagggtccctgagcatgggaggaggggtaggctgggctgctgggagcctggcccagcctcttctctccatccccctccaggaactttccagcagccttgggcagtggatctgcctgtgccccgcctgctgtggggatggagggacaggggcgccacagaaggagcccggaagtgtgcccagggccctgcagccttcagtgctgggcaggcggtggggaggggcctgactgggttgggggcgtgcttgcatcctggcccccagggtctgcccctggtcaagccctgtcccttgatggctgcctctgtccctagcatttctcctgtgccgggcactggagggtgctgggctgtcacccaagcctctgaggcctggggacacgtctacacggacagtgtcactgcccacaccatctgagaaccactccgagggaagggagagggtgggcggtggtttggggagttgcctggaggaggagggattagccttgaagatgaggagggctgggggttggagaagagcagattggatatggggggcaccatgcccttcctgagctggtccctggctctgcacctcagtgctaggtctaagctggagggtccagggcccaggtggcattgctgacccccagggggtcggggctgctctgaggcccttctgtagatgtagatggaagcctagtcctgtccaccttcctgaggccaggtggagttgctttccctgcaagcccaggcagctctgccctgtgcccctcccccagccctgcagtcccccaggcccacgcagggccggcctcatggtctcgcttcctctctgggtctgcttcagggcccagcctccagccccatgagcctgggccctcctgctcctgtccccactggccccaggtcacttcaacactggctctccccgcaccctgggcctgctcagccactcctgcccacagccaggagcttctgtgcagcttctttcctttcacttgcagcctgcctgccctctgcttccccggaccccttgtgaacttccctgacctctctgcagaactgggcaaagccactcaccctggttcccccgggtttagcctggtctcttgacacccactcagggctgcccagccttcatcctgcttcactgggcccagcctcattccagggcttctgagactgcagggccctctcttctcccctctccctgctttgcaaattctcagttcatcctggcagctccaactctccatccctccacccatccatccccccatccatccacctatccctccacccatccctccacccatccctccacccatccctccactcatccatccactcatccctccacccatccctacacccatccagccacccatccatccacccatccctccacccatccatccagccatccaaccacccatccctccacccatccatccactcatccctccacccatccctccacccatccctccacccatccctccacccatccctccactcatccatccactcatccctccacccatcccctacccatccagccacccatccatccacccatccctccacccatccatccaaccatccaaccacccatccctccacccatccatccatccatccaaccacccatccctccacccagtcatccacccatctacccattcacccacttacccactcattcacccactcatccatccactcgtccatctacccaccaaaccatccactcaccatccacccattcacctactcacctgtccatccacccacttaactctcactcacccactcatccatccatccactcaccctccatccacccacccagtcatctatctattcatctgtccatccacccactcacccacttacctctcactcgcccactcatccatccatccactcaccctccatccacccacccacccatctatctattcatctatccatctacccactcacccacttacccactcacccactcatccatccatccactcaccctccatccacccacccagtcatctatctattcatctatccatctatccactcacccacttacctctcactcgcccactcatccatccaaccactcaccctccatccacccacccagtcatctatccatctatccatctacccattcacccacttacccgctcacccactcatccatccatccactcaccctccatccacccacccagtcatctatctattcatctattcatctatccatctacccactcacccactcacccactcatccatccatccactcaccctccatccatccacccactcatctatctatccatctatccatctacccactcacccacttacccgctcacccactcatccatccatccactcgccctccatccaccccccagtcatctgtctactcatctgtccatctacccacttaactctcactcacccactcatccatccatccactcgccctccatccaccccccagtcatctgtctactcatctgtccatctacccacttacctctcactcgcccactcatccatccatccactcaccctccatccacccacccactcatctatctattcatctatccatctacccactcacccacttacctctcacttgcccactcatccatccatccactcaccctccatccacccacccagtcatctatctattcatctatccatctatccactcacccacttacctctcactcgcccactcatccatccaaccactcaccctccatccacccacccagtcatctatccatctatccgtctacccattcacccacttacccactcacccactcatccatccatccactcaccctccatccacccacccagtcatctatctattcatctattcatctatccatctacccactcacccactcatccatctatccactcgccctccatccacccccagtcatctgtctactcatctgtccatctacccacttgactctcactcacccactcatccatccatccactcactcctccatccacccacccactcatccacgtatacaaacacatggacaggcactacccacatgctggactttcagccaagagatgagctcagcgtcatggagggaagaaagcgaaaggtgttcggtgctcttttaagcaagacaggcctcatggagaagttggcgtgggggcagagactggacggagctgaggcctcatggagaagttggcgtgggggcagagactggaaggagctgaggaaggagtatgaagcatccagaaagagcgttcttcctcacagggataaaacatgagtggtctgggagtgtttgagccacagcaggaagtcgggggtttgggttggtgggagctgcagcaggaagaggtggggggcctgtgtagggggctgaggtcagagctgtaatggggggcagatggcctgggctgcataggccatgccgtttgttcaacagacaccatgggaccctgaggccatggggtgaattgtggccctcagaaaggtctgtcccgtcatgtgcagtgactcgaacctgtaatcccagctacccaggaggctgagccaggaggatcacttgagcccaggagtccaaggttatagtgagctgcgatggcacctgtgaacagacactgcactccagcctaacctaaccctaaccctaacccaacctccacgcagcacccacgtggcctcgtggcacagctcggttcatagtccagcagtggtaccttatttccttggtgacaagcaacaccctcatgatgacccatgaggccacctgacccacactacccatcaccaccaccgctatgacacctgcccagccacagtggtcccaggttgggttgcccctgcctagaccccttcccctgcagacctttgcccaggtcatcttggcgtggttgcaccctcggcgtggagtctgccttggaattcctctgcacaatggcagcccgtgtggacctgtcccacaaacgctctgagaatgaagaggacacacttccaatggcacctgctgtggccagcttcactcctccaggatgtcctgcagacccctcacccagcatgcgtctgccggtccaccactgccctccaccacacctcacattgagttagttgaggagatccacggactccaccaggccctggcccctgctgctgtccagcctcctgtagagccagcccctctggccatgctccatatgggaccagagcagtggggccagagtctgcctctctccacttagagccctccgtgaatcccgtgggccactggcaaatccaggccctggccaggctttccagcacctggccccatccctggtcctcccacccacccctccactcccagtcccaggctgcacctgctgccctcttgcccaggccctctggtatcacccttgtcctggtaactcacgcacgccctctgctgtactgtgccatcctgacccccaggagtctggcctccctggtctcccttcctgtttgttctggcattgagccccccaccatccgccagagacactgctaaccatggtcccaagacgcctgctggcaagtcctctccaggatccctggggctctgtctggggctcccagaccagaggggtcagacagaaggccctggagggtgcctcgagggactctggcaccccaccaatggctaactccctgctccccgggttagcttgtctcctgcccctgtgttagcttcccccttgccccctagcccctgggttagcttgtcccctgccccccgggttagcttgtcccctgccccccgggttagattggcccctgcccctgggttagcttggcccctgccccccgggttagcttggcccctgcccctgggttagcttggcccctgccccctgccccccaggttagcttgccccctgccccccgggttagcttgccggggagacccagctgccaggcatccttgctgaggttgcccaccggcccgctcagcaggcctcatcctggaggaacctgtccctctgggtctggcccccagggtccccgctcttcccagctcccacacaggtgcggccaggccagggctggcacccacaggctgacagccccacccctcaagcctggtctccaccttctcagctgggcccctggccctgcccactcccctctggcccaggccggggctgcagccccaggctcagagtgtagtctccagcctgtcccccggctcccagccccagccagcccaggcctcagccggcctgaaaccaaagagaaaatgcctgtttatgccagtcatgccgaaagcaaaacagtttgtggtttgtgacccaaattttttgcctttttttttcagaacataacaaagcccaagacaactccctccccgctcccagccctccccccaaggcagacagaaatgatctgtttacactggccgcggcacattccggccgccagcccggccctctccccagtgccgtgccctccgtgctgggctcctcctcggtggaaggggctgctgaggccggggagaggggaccgcaccacagacctggagcgagggtggggcttgcttcctctgggggatggctgaatgagatgtgtcttgggggttgggggtaccggggtgcatgtccatctgggagttggagtggggactccatgctgcctgcacaggctacacagggaaggatggcaggagagcggccgcctgcagccgctccctccagggaacccctctccaagtctgcctttcagtacccccttcacatagacaggtgcttagaccctcagggtgacaggacctattacctacccaccccctctactgcactccatcctctcgcctcctccctccttgattgtccaaagcctgagaccccctgactcagctcggccgtggagcacacagagatggggatgcctctgcccttgaaagcctgcagccccagagtggcggtgtcagtggggtggtgggtgtggaggagggtggccccagactgcattgagggaggggggtgcaggcacatgttggagcccagtggtagggggcaggtgggaccccaaggtgccatgactggaagcaagaacaggcccctccccatcttcagactgttcccacgtgcctggctctcccaggggacagaaaagtggtgcaaaccttcaccttccccaggcctcctcggagtcctcctcggagtcctcggagagccagaattgcccctctctccttccagcctcctccactgccctctcctgatcgcctcctcccagtcttcattctttgttcgcgcacttggctatgcctgctcctggtgctggggagccagggcttcagaagaaggaattcctgggccaaggggacctggtggtgtgagcggggtgaggcaaaggcacctggaggtctggggctgagaaagaccatgcagacaggggtgctcctcccgcggggtcggacaggagcgtgggcattggcaggacgtgggtgggaagggcgttctaggcacagggaaccgcatgtgcaggcacaggtgtgcacacatggagggagatggctgcagctcaaagggcctcggtgctgagccaagaagctgaacttgaccttcagtgagctctgggaggcggggaggggcttttaaggggagagtgagccactctagccatcaattctggagagatggtctaagtgtgggaactcctggagcctgagagggtttggaggtgcactagcgggtggggtgggtggggtggaaggggtggtgctgggccgggcgcagggaggcaccccagctgggaggagctcggtgtggcccagcagcatcgcacgcatgcacagatggggtcatttccaccctgcccccagccccaccaaatgcagaccctggctcctcagctggggggagtatggggagcagggagctcctcctgcctcaggccctgggggcaacccaggtctgcccactctcaggctggctggctcccccgcctggctgggagcatcacttcgggaaggtctggccgagtacctctgcttcccttcccctgccttgtcgtccctggcctcccgtctatcaggaacagatgtgcctctgagcaggaatcctagctatttggtttagccagccactctcgggaatttctgataaggcaaattggttctctgcagagtcggtggaggtagtgggggagaagacaagcagtgcccacccccacctttctcctgccgaggacggggcctaggatacgccccagcctggtccctggccccagctcagcagcactgtggggaggaagactttcgaggcctctcctgatgctccgtggcgctgcagtggctgagggctggccggccccagcaggtgggagcgggctgagaccacaggggtttcccccacccctggacctgggctcagagctttgtgggagggaaagaaatctacactggagccctctgtggtgttgaagcaagcagccgcaaccctccccagcacccagccctcagcggccacatgtcccatgttccgggctccgtgcgggaccttccacaacactctggtccttcctgccttcatcatctgttcaatacacatatgccaggccctgtacaaagccctagaatcatgaagatggataaagttccattcctgccctcaaaacaactctaggaagtggcacatcaacataaatgtaacaaacagcagggctgaggaggggcccggctagcaccttgtaaattattcactcagatcttccctggatcccagaacatcgtcttatcttgttctattctgtccatggttttagcctgtggaggccatttaaagtatcagtttggtcttccagccacttagcttatatttctcagccttggaccttcaatgtgggctccatgaatggatgggtgggttggtggatggataagcagatgggcagatgggtagatgtatggataggtagatgatggagtgggtgggtgatggatgggtgaatagatgtgtgtgtgggtgaatggatgtatggatggataaatggatgtgtggataggtgcaagtcagctgtaggtcaacaagtgtctacctggattctcttctgacatgatccttgtgagggaagagagcaaagagactgtaatccattgtatgtctgtgcttatagagattctatgtgttgattcaggttgaatataccctgtttttaggatccgacacatcatagagattaaaagatatttgtcgattaaatgaaatttattgggaatgatattaaaaggaattttaaaaatgaaatgtaaaggtcttgtttaagtgaacatatacctggaaattgtctcaagaggacctagaaaaatctgaacatatcggccgggctcagtggctcacgcctgtaatcccagcactttgggaggtcaaggcaggcggatcatgaggtcaggagttcgagaccaacctgatcaacttggtgaaaccctgtctctactaaaaatataaaaattagccggatgtggtggcgcacgcctgtaatcccagctactcaggaagctgaggcaggaggatcacttgaacccgggaggcggaggttgcagtgagctgagatcataccactacactccagcctgggtgacagagcgagactctgtctcaaaaaaaaaaaaaaaagaaaaagaaaaatctgaaaatctgaacataccaattaccaggttgtcaactgagggttacaagatgctaccccagaaaaaggcacagggcccagagtgttccacgggaaagttttttaaacactcaagatcatgcctgtactatacaaaatgtttcaagtgtagaagatggacacggtttctattcatttttggtgttagcataaccctgattaacaaaacccaaacacaatggcacaaaaaaggaaaaaccacagtccaaggtcacatgtaaagaaagatgcaaaaattgtcaataagagaattagcaaattaaatccagcagtgtattaaattaaagtaataacacaccatgaccaagtagagtttgtttccaggaacgcaaggatgactcaacatgaagaaatccattaatatcatgatgctaataagccaaaggaagaaaaaccatatgataatattgagaagtgccaaaaacgtatgtaataaaatctaaaatgcactaccagttataaaccgtgttgagcaggctaggactaaaaagaaacttcctcaacataagagaagatacctagtcctcagtttcctgctatctcctcacccactgagaggacttttcacgacaaccaccaaccttcttgtagccaaattcagggcacccttttttttttattagacttgaccactcagcagccttttcctgctcacccgcttgctctcactccccactcggaaacttctcttggttctccttctagtatggagtagcaaactttaacaaa

SEQ ID NO: 1090 - DNA, 5175 bp, Homo sapiens
atacaccattttacaggtaaagcttccttccctcctgcctccctatgcctgctgaccaccagcaagaaattggacaggagactgaggagaaacgccgggagaggcaacaaccgccctccatgtcccccctaggtttagcttctctcctcctgatggcgcacctggtcccccttgctgctctcccagcctccctggcacagagaggcgccctggggccaaggcagtttccctgggaatgctcattcatgcatgaagtttttctctgttgcaccctggacccagactcctcaatccacccagggtggtgtctgtggggagggggttcacttccccaggaagcacagccacgccgtccctcactggcctcgtcaagcagagctgtgtgtccagtggcttttgctggggccccctccttatctccttccaaggtgggggtgtttggaggtggaggaggctttcatattccgtgccatgacccctcaaggcgggccattcgtgtgcaccctccacccccagtgccaggcagaagcccatcctcacccaggaacagggcagcctgtccaacagaagggtctcggcctctccatcagcaccgggaagccctttctaggcaaacttctcaccacttcttccctcccttatactttgaaagagggagctctaggcaggggaggggctagagggggaagccgctgcccagatcctgacaaggtgacctgaaggaacccggggagggggatgggacagggctcaggcttggggtgtatggggaggggggctttgcttttaaaagaggtcatctcagcaatatctttttgtttttccccaggggccgaagagtcaccaccgagcttgtgtgggaggaggtggattccagcccccagccccagggctctgaatcgctgccagctcagccccctgcccagcctgccccacagcctgagccccagcaggccagagagcccagtcctgaggtgagctgctgtggcctgtggcccaggcgaccccagcgctcccagaactgaggctggcagccagccccagcctcagccccaactgcgaggcagagagacaccaatgggaatcccaatggggaagtcgatgctggtgcttctcaccttcttggccttcgcctcgtgctgcattgctgcttaccgccccagtgagaccctgtgcggcggggagctggtggacaccctccagttcgtctgtggggaccgcggcttctacttcagacttccaggcaggcccgcaagccgtgtgagccgtcgcagccgtggcatcgttgaggagtgctgtttccgcagctgtgacctggccctcctggagacgtactgtgctacccccgccaagtccgagagggacgtgtcgacccctccgaccgtgcttccggacaacttccccagataccccgtgggcaagttcttccaatatgacacctggaagcagtccacccagcgcctgcgcaggggcctgcctgccctcctgcgtgcccgccggggtcacgtgctcgccaaggagctcgaggcgttcagggaggccaaacgtcaccgtcccctgattgctctacccacccaagaccccgcccacgggggcgcccccccagagatggccagcaatcggaagtgagcaaaactgccgcaagtctgcagcccggcgccaccatcctgcagcctcctcctgaccacggacgtttccatcaggttccatcccgaaaatctctcggttccacgtccccctggggcttctcctgacccagtccccgtgccccgcctccccgaaacaggctactctcctcggccccctccatcgggctgaggaagcacagcagcatcttcaaacatgtacaaaatcgattggctttaaacacccttcacataccctccccccaaattatccccaattatccccacacatattagaaacaccccacaaaagctcagaaattggctttaaaaaaaacaaccaccaaaaaaaatcaattggctaaaaaaaaaaagtattaaaaacgaattggctgagaaacaattggcaaaataaaggaatttggcactccccacccccctctttctcttctcccttggactttgagtcaaattggcctggacttgagtccctgaaccagcaaagagaaaagaagggccccagaaatcacaggtgggcacgtcgctgctaccgccatctcccttctcacgggaattttcagggtaaactggccatccgaaaatagcaacaacccagactggctcctcactcccttttccatcactaaaaatcacagagcagtcagagggacccagtaagaccaaaggaggggaggacagagcatgaaaaccaaaatccatgcaaatgaaatgtaattggcacgaccctcacccccaaatcttacatctcaattcccatcctaaaaagcactcatactttatgcatccccgcagctacacacacacaacacacagcacacgcatgaacacagcacacacacgagcacagcacacacacaaacgcacagcacacacgcacacacagcacacacacgagcacacagcacacaaacgcacagcacacgcacacacatgcacacacacacacacatgcacacacagcacacacacgcgaacacagcacacacgaacacagcacacacagcacacacacaaacacagcacacacatgcacacagcacatgcacacacagcacacacatgaacacagcacacagcacacacatgcacacagcacacacgcatgcacagcacacatgaacacagcacacacaaacacacagcacacacatgcacacacagcacacacactcatgcgcagcacatacatgaacacagctcacagcacacaaacacgcagcacacacgttgcacacgcaagcacccacctgcacacacacatgcgcacacacacgcacacccccacaaaattggatgaaaacaataagcatatctaagcaactacgatatctgtatggatcaggccaaagtcccgctaagattctccaatgttttcatggtctgagcccccctcctgttcccatctccactgcccctcggccctgtctgtgccctgcctctcagaggagggggctcagatggtgcggcctgagtgtgcggccggcggcatttgggatacacccgtagggtgggcggggtgtgtcccaggcctaattccatctttccaccatgacagagatgcccttgtgaggctggcctccttggcgcctgtccccacggcccccgcagcgtgagccacgatgctccccataccccacccattcccgatacaccttacttactgtgtgttggcccagccagagtgaggaaggagtttggccacattggagatggcggtagctgagcagacatgcccccacgagtagcctgactccctggtgtgctcctggaaggaagatcttggggacccccccaccggagcacacctagggatcatctttgcccgtctcctggggaccccccaagaaatgtggagtcctcgggggccgtgcactgatgcggggagtgtgggaagtctggcggttggaggggtgggtggggggcagtgggggctgggcggggggagttctggggtaggaagtggtcccgggagattttggatggaaaagtcaggaggattgacagcagacttgcagaattacatagagaaattaggaacccccaaatttttttttttttttgttttttttttacccctccttagctttatgcgctcagaaaccaaattaaaccccccccccatgtaacaggggggcagtgacaaaagcaagaacgcacgaagccagcctggagaccaccacgtcctgccccccgccatttatcgccctgattggattttgtttttcatctgtccctgttgcttgggttgagttgagggtggagcctcctggggggcactggccactgagcccccttggagaagtcagaggggagtggagaaggccactgtccggcctggcttctggggacagtggctggtccccagaagtcctgagggcggaggggggggttgggcagggtctcctcaggtgtcaggagggtgctcggaggccacaggagggggctcctggctggcctgaggctggccggaggggaaggggctagcaggtgtgtaaacagagggttccatcaggctggggcagggtggccgccttccgcacacttgaggaaccctcccctctccctcggtgacatcttgcccgcccctcagcaccctgccttgtctccaggaggtccgaagctctgtgggacctcttgggggcaaggtggggtgaggccggggagtagggaggtcaggcgggtctgagcccacagagcaggagagctgccaggtctgcccatcgaccaggttgcttgggccccggagcccacgggtctggtgatgccatagcagccaccaccgcggcgcctagggctgcggcagggactcggcctctgggaggtttacctcgcccccacttgtgcccccagctcagcccccctgcacgcagcccgactagcagtctagaggcctgaggcttctgggtcctggtgacggggctggcatgaccccgggggtcgtccatgccagtccgcctcagtcgcagagggtccctcggcaagcgccctgtgagtgggccattcggaacattggacagaagcccaaagagccaaattgtcacaattgtggaacccacattggcctgagatccaaaacgcttcgaggcaccccaaattacctgcccattcgtcaggacacccacccacccagtgttatattctgcctcgccggagtgggtgttcccgggggcacttgccgaccagccccttgcgtccccaggtttgcagctctcccctgggccactaaccatcctggcccgggctgcctgtctgacctccgtgcctagtcgtggctctccatcttgtctcctccccgtgtccccaatgtcttcagtggggggccccctcttgggtcccctcctctgccatcacctgaagacccccacgccaaacactgaatgtcacctgtgcctgccgcctcggtccaccttgcggcccgtgtttgactcaactcagctcctttaacgctaatatttccggcaaaatcccatgcttgggttttgtctttaaccttgtaacgcttgcaatcccaataaagcattaaaagtca

SEQ ID NO: 1091 - protein, 211 aa, Homo sapiens [sequence omitted]

SEQ ID NO: 1092 - DNA, 2868 bp, Homo sapiens
cgccccccagtcaccgcctcccccggcccctcgacgtggcgcccttccctccgcttctctgtgctccccgcgcccctcttggcgtctggccccggcccccgctctttctcccgcaaccttcccttcgctccctcccgtcccccccagctcctagcctccgactccctccccccctcacgcccgccctctcgccttcgccgaaccaaagtggattaattacacgctttctgtttctctccgtgctgttctctcccgctgtgcgcctgcccgcctctcgctgtcctctctccccctcgccctctcttcggcccccccctttcacgttcactctgtctctcccactatctctgcccccctctatccttgatacaacagctgacctcatttcccgataccttttcccccccgaaaagtacaacatctggcccgccccagcccgaagacagcccgtcctccctggacaatcagacgaattctccccccccccccaaaaaaaagccatccccccgctctgccccgtcgcacattcggcccccgcgactcggccagagcggcgctggcagaggagtgtccggcaggagggccaacgcccgctgttcggtttgcgacacgcagcagggaggtgggcggcagcgtcgccggcttccagacaccaatgggaatcccaatggggaagtcgatgctggtgcttctcaccttcttggccttcgcctcgtgctgcattgctgcttaccgccccagtgagaccctgtgcggcggggagctggtggacaccctccagttcgtctgtggggaccgcggcttctacttcagcaggcccgcaagccgtgtgagccgtcgcagccgtggcatcgttgaggagtgctgtttccgcagctgtgacctggccctcctggagacgtactgtgctacccccgccaagtccgagagggacgtgtcgacccctccgaccgtgcttccggacaacttccccagataccccgtgggcaagttcttccaatatgacacctggaagcagtccacccagcgcctgcgcaggggcctgcctgccctcctgcgtgcccgccggggtcacgtgctcgccaaggagctcgaggcgttcagggaggccaaacgtcaccgtcccctgattgctctacccacccaagaccccgcccacgggggcgcccccccagagatggccagcaatcggaagtgagcaaaactgccgcaagtctgcagcccggcgccaccatcctgcagcctcctcctgaccacggacgtttccatcaggttccatcccgaaaatctctcggttccacgtccccctggggcttctcctgacccagtccccgtgccccgcctccccgaaacaggctactctcctcggccccctccatcgggctgaggaagcacagcagcatcttcaaacatgtacaaaatcgattggctttaaacacccttcacataccctccccccaaattatccccaattatccccacacataaaaaatcaaaacattaaactaacccccttcccccccccccacaacaaccctcttaaaactaattggctttttagaaacaccccacaaaagctcagaaattggctttaaaaaaaacaaccaccaaaaaaaatcaattggctaaaaaaaaaaagtattaaaaacgaattggctgagaaacaattggcaaaataaaggaatttggcactccccacccccctctttctcttctcccttggactttgagtcaaattggcctggacttgagtccctgaaccagcaaagagaaaagaagggccccagaaatcacaggtgggcacgtcgctgctaccgccatctcccttctcacgggaattttcagggtaaactggccatccgaaaatagcaacaacccagactggctcctcactcccttttccatcactaaaaatcacagagcagtcagagggacccagtaagaccaaaggaggggaggacagagcatgaaaaccaaaatccatgcaaatgaaatgtaattggcacgaccctcacccccaaatcttacatctcaattcccatcctaaaaagcactcatactttatgcatccccgcagctacacacacacaacacacagcacacgcatgaacacagcacacacacgagcacagcacacacacgagcatacagcacacacacaaacgcacagcacacacagcacacagatgagcacacagcacacacacaaacgcacagcacacacacgcacacacatgcacacacagcacacaaacgcacggcacacacacgcacacacatgcacacacagcacacacgcaaacgcacagcacacacaaacgcacagcacacacgcacacacagcacacacacgagcacacagcacacaaacgcacagcacacgcacacacatgcacacacagcacacacactagcacacagcacacacacaaagacacagcacacacatgcacacacagcacacacacgcgaacacagcacacacgaacacagcacacacagcacacacacaaacacagcacacacatgcacacagcacatgcacacacagcacacacatgaacacagcacacagcacacacatgcacacagcacacacgcatgcacagcacacatgaacacagcacacacaaacacacagcacacacatgcacacacagcacacacactcatgcgcagcacatacatgaacacagctcacagcacacaaacacgcagcacacacgttgcacacgcaagcacccacctgcacacacacatgcgcacacacacgcacacccccacaaaattggatgaaaacaataagcatatctaagcaactacgatatctgtatggatcaggccaaagtcccgctaagattctccaat

SEQ ID NO: 1093 - protein, 176 aa, Homo sapiens
MGIPMGKSMLVLLTFLAFASCCIAAYRPSETLCGGELVDTLQFVCGDRGFYFSRPASRVSRRSRGIVEECCFRSCDLALLETYCATPAKSDVSTPPTVLPDNFPRYPVGKFFQYDTWKQSTQRLRRGLPALLRARRGHVLAKELEAFREAKRHRPLIALPTQDPAHGGAPPEMNRK

SEQ ID NO: 1094 - DNA, 5183 bp, Homo sapiens
atacaccattttacaggtaaagcttccttccctcctgcctccctatgcctgctgaccaccagcaagaaattggacaggagactgaggagaaacgccgggagaggcaacaaccgccctccatgtcccccctaggtttagcttctctcctcctgatggcgcacctggtcccccttgctgctctcccagcctccctggcacagagaggcgccctggggccaaggcagtttccctgggaatgctcattcatgcatgaagtttttctctgttgcaccctggacccagactcctcaatccacccagggtggtgtctgtggggagggggttcacttccccaggaagcacagccacgccgtccctcactggcctcgtcaagcagagctgtgtgtccagtggcttttgctggggccccctccttatctccttccaaggtgggggtgtttggaggtggaggaggctttcatattccgtgccatgacccctcaaggcgggccattcgtgtgcaccctccacccccagtgccaggcagaagcccatcctcacccaggaacagggcagcctgtccaacagaagggtctcggcctctccatcagcaccgggaagccctttctaggcaaacttctcaccacttcttccctcccttatactttgaaagagggagctctaggcaggggaggggctagagggggaagccgctgcccagatcctgacaaggtgacctgaaggaacccggggagggggatgggacagggctcaggcttggggtgtatggggaggggggctttgcttttaaaagaggtcatctcagcaatatctttttgtttttccccaggggccgaagagtcaccaccgagcttgtgtgggaggaggtggattccagcccccagccccagggctctgaatcgctgccagctcagccccctgcccagcctgccccacagcctgagccccagcaggccagagagcccagtcctgaggtgagctgctgtggcctgtggcccaggcgaccccagcgctcccagaactgaggctggcagccagccccagcctcagccccaactgcgaggcagagagacaccaatgggaatcccaatggggaagtcgatgctggtgcttctcaccttcttggccttcgcctcgtgctgcattgctgcttaccgccccagtgagaccctgtgcggcggggagctggtggacaccctccagttcgtctgtggggaccgcggcttctacttcagcaggcccgcaagccgtgtgagccgtcgcagccgtggcatcgttgaggagtgctgtttccgcagctgtgacctggccctcctggagacgtactgtgctacccccgccaagtccgagagggacgtgtcgacccctccgaccgtgcttccggacaacttccccagataccccgtgggcaagttcttccaatatgacacctggaagcagtccacccagcgcctgcgcaggggcctgcctgccctcctgcgtgcccgccggggtcacgtgctcgccaaggagctcgaggcgttcagggaggccaaacgtcaccgtcccctgattgctctacccacccaagaccccgcccacgggggcgcccccccagagatggccagcaatcggaagtgagcaaaactgccgcaagtctgcagcccggcgccaccatcctgcagcctcctcctgaccacggacgtttccatcaggttccatcccgaaaatctctcggttccacgtccccctggggcttctcctgacccagtccccgtgccccgcctccccgaaacaggctactctcctcggccccctccatcgggctgaggaagcacagcagcatcttcaaacatgtacaaaatcgattggctttaaacacccttcacataccctccccccaaattatccccaattatccccacacataaaaaatcaaaacattaaactaacccccttcccccccccccacaacaaccctcttaaaactaattggctttttagaaacaccccacaaaagctcagaaattggctttaaaaaaaacaaccaccaaaaaaaatcaattggctaaaaaaaaaaagtattaaaaacgaattggctgagaaacaattggcaaaataaaggaatttggcactccccacccccctctttctcttctcccttggactttgagtcaaattggcctggacttgagtccctgaaccagcaaagagaaaagaagggccccagaaatcacaggtgggcacgtcgctgctaccgccatctcccttctcacgggaattttcagggtaaactggccatccgaaaatagcaacaacccagactggctcctcactcccttttccatcactaaaaatcacagagcagtcagagggacccagtaagaccaaaggaggggaggacagagcatgaaaaccaaaatccatgcaaatgaaatgtaattggcacgaccctcacccccaaatcttacatctcaattcccatcctaaaaagcactcatactttatgcatccccgcagctacacacacacaacacacagcacacgcatgaacacagcacacacacgagcacagcacacacacaaacgcacagcacacacgcacacacagcacacacacgagcacacagcacacaaacgcacagcacacgcacacacatgcacacacacacacacatgcacacacagcacacacacgcgaacacagcacacacgaacacagcacacacagcacacacacaaacacagcacacacatgcacacagcacatgcacacacagcacacacatgaacacagcacacagcacacacatgcacacagcacacacgcatgcacagcacacatgaacacagcacacacaaacacacagcacacacatgcacacacagcacacacactcatgcgcagcacatacatgaacacagctcacagcacacaaacacgcagcacacacgttgcacacgcaagcacccacctgcacacacacatgcgcacacacacgcacacccccacaaaattggatgaaaacaataagcatatctaagcaactacgatatctgtatggatcaggccaaagtcccgctaagattctccaatgttttcatggtctgagcccccctcctgttcccatctccactgcccctcggccctgtctgtgccctgcctctcagaggagggggctcagatggtgcggcctgagtgtgcggccggcggcatttgggatacacccgtagggtgggcggggtgtgtcccaggcctaattccatctttccaccatgacagagatgcccttgtgaggctggcctccttggcgcctgtccccacggcccccgcagcgtgagccacgatgctccccataccccacccattcccgatacaccttacttactgtgtgttggcccagccagagtgaggaaggagtttggccacattggagatggcggtagctgagcagacatgcccccacgagtagcctgactccctggtgtgctcctggaaggaagatcttggggacccccccaccggagcacacctagggatcatctttgcccgtctcctggggaccccccaagaaatgtggagtcctcgggggccgtgcactgatgcggggagtgtgggaagtctggcggttggaggggtgggtggggggcagtgggggctgggcggggggagttctggggtaggaagtggtcccgggagattttggatggaaaagtcaggaggattgacagcagacttgcagaattacatagagaaattaggaacccccaaatttttttttttttttgttttttttttacccctccttagctttatgcgctcagaaaccaaattaaaccccccccccatgtaacaggggggcagtgacaaaagcaagaacgcacgaagccagcctggagaccaccacgtcctgccccccgccatttatcgccctgattggattttgtttttcatctgtccctgttgcttgggttgagttgagggtggagcctcctggggggcactggccactgagcccccttggagaagtcagaggggagtggagaaggccactgtccggcctggcttctggggacagtggctggtccccagaagtcctgagggcggaggggggggttgggcagggtctcctcaggtgtcaggagggtgctcggaggccacaggagggggctcctggctggcctgaggctggccggaggggaaggggctagcaggtgtgtaaacagagggttccatcaggctggggcagggtggccgccttccgcacacttgaggaaccctcccctctccctcggtgacatcttgcccgcccctcagcaccctgccttgtctccaggaggtccgaagctctgtgggacctcttgggggcaaggtggggtgaggccggggagtagggaggtcaggcgggtctgagcccacagagcaggagagctgccaggtctgcccatcgaccaggttgcttgggccccggagcccacgggtctggttgggaggtttacctcgcccccacttgtgcccccagctcagcccccctgcacgcagcccgactagcagtctagaggcctgaggcttctgggtcctggtgacggggctggcatgaccccgggggtcgtccatgccagtccgcctcagtcgcagagggtccctcggcaagcgccctgtgagtgggccattcggaacattggacagaagcccaaagagccaaattgtcacaattgtggaacccacattggcctgagatccaaaacgcttcgaggcaccccaaattacctgcccattcgtcaggacacccacccacccagtgttatattctgcctcgccggagtgggtgttcccgggggcacttgccgaccagccccttgcgtccccaggtttgcagctctcccctgggccactaaccatcctggcccgggctgcctgtctgacctccgtgcctagtcgtggctctccatcttgtctcctccccgtgtccccaatgtcttcagtggggggccccctcttgggtcccctcctctgccatcacctgaagacccccacgccaaacactgaatgtcacctgtgcctgccgcctcggtccaccttgcggcccgtgtttgactcaactcagctcctttaacgctaatatttccggcaaaatcccatgcttgggttttgtctttaaccttgtaacgcttgcaatcccaataaagcattaaaagtcatg

SEQ ID NO: 1095 - protein, 211 aa, Homo sapiens [sequence omitted]

SEQ ID NO: 1096 - DNA, 49087 bp, Mus musculus
taaattagaattaaggtgtatgttgtggttaaaactgcacaaaagcttgtgaagttcttgaccggtgtgattttcttctacacatgctaggcttttattattcattagctaaatatttttaaacttcattgactttgaggattttctttaaaaaatcaagttgtctaaagaagtgcttttagggtaaaaggtgtgtcctgtattcttttttaacattcttgtgttcagaagtcagcaggccttgcctgtgtaatgcagggtgtcttagggtacccccactcttcccaccttcgcattttctaagtcacttgtagtcttggtttagaactttacttagtgttatgttcttaagatttcaatgttactacagttgatccatcgtaggaaacaattattttttcctgcagcactttcttttctgaccttatatttccttagatagcatccttgtcacttcttttctcctagatattaaaatccaaatctgctctgtgcttcggattttagttaccagagggaaatgaatttaagtctttgtgcagggatttgtacagttttcttataggttagaaatgattaaggctggtaagttagattgcagttttgtacgagattgctaaatgcttgaactgagtcaattcacttgttcaacaattagaaggccctagtggctcaaagtgataattagccccaaagtttcctggtggagaagtagcctctgtgttgccagcagcgtcagaacgtctgccagtgtttgaaaagcattaccctgggacatgtggtcattgctctgactcccacgctcaaaaggatcattttaactggcagttcttgtgaatggcaagatggtgtaacatcaaggaaatataactgataccatggtgaaaagggaaaatacagaggggggcggtaaagatgggtacatggtgaaaccgtccaccctggtagttccaagaatgaaggaaggcatctcatctcagccattttgtaaggaaggctgtgtgcacagggaacaaaaaggagtcaaagcctttactgaagagtaacaaaagccatacatttcaaaagctttaaggcatttcaataattactgactggaaggcatctcagctagggagcttttgctcatttcaggtattccttgtatccataagtagaaaagactagcaaaaattaatgttatcttccgacggcatgtttaaggatgcctgtaataaaagatgaaagtgcagaaataaaagtaatgtacagatatttaataaatgtacattagtgaatacaggaatacagtattggggtaatatgctgtttattgtagttttgttggatatgttgtttaatggggtatcttaaatcaagacatagatgtttatagtctgttttttaagttatagggaagtcaaacactgaattatactcatgttcagtgaacacatctaccattgtcatgtgaatgagcctcgtggaaagattaagtgattgctttattatgtttaatttagttattgaaagttttattggcatcctaaactgtggacatggctttgggaggttagatggctggtcacatgggttacagacacaaaccactgtactgctggagtgttctgtttctttctgagagctccatactgcagtgctgtgtccttaagtaactttgtaatgcttggatgagtccctcctactcctgctgacattgaacgatcctgatacctcttggctgtgctagttggtcctactcatgcccttgtaacattttaataacagtcttttgagctatgactaagggtcttctctcactagttttgtactttatatagttttaagtcaaacattagccgtatcacatctaattatggtaatgtcttacattggtagacctaattgtttcccagagcagttttgtatgcattatgttagttctcttggtagatgagcatagatgttattgacttcattttgctgaggatagtcagtagcagtgatatggtaaataagtgagtatttttgatttctggtctgcaatgctttctataagatgatgcatctagtgagtccatgaggaatgaggatgaacaccaagtaatacttgcacataaggaacatgtaaatgatgcaacataggaagataaaaacgaaagcctttaccacttaaaactgtagtatgaatttttattttgttttgttctgggttaactataaaacaagcaaaggtcagtagccccatgttataagtgataagaattaaaagatgttactgtttactgaaggactcataactaataaggcagctagtcatgaacaaatctttaaaaaattttaattatatatttacttttctatgtgcctgtacatggagatgtgtgtgtctatatgtatgtgtgtgtgtgtgtgtgtgtgtgtgtgtgtgtataggtaattggtgcatagtacatgtgtagaaggcacaggacagctttgcagagccagctctcttgcaggttctgagagtgaaactgggtaaccaggcgtttgcagaagccttttctcctgtcttgctggcccttctaaccgacctgactctggctgatcctcccacaagctgattcactcccacaccgcaccttttctgctcctactgtttgatcaaaagaaagaacctacttgtgttttcctgaacaagtgctgtgatgaaatcttttaagatggacatttaaaacattttaaactgtgggttcattttctgaagggattttcacgtgtgtactaacagtgttatatacttataaaatcccagttgagcagtttaatggtttctctttgaatttctacctctttgcctttcaaaataacaatgaagaacatttaaaaggttagcataatgaacttataatactttattgttagtatttattgcatgcatgtctatgagagaactgggctgaggtattaactgtattcttcaaaaatacactctaaaatgctttttgtaaccctctttaatttttaaaaatgaaataattaggtgatatgtggagtttatatccagttgattgccctttctagaagcctagtgctggaaataggattcattagtatttactagtacttttttcctatatcagtcacaattagtatctaattgaatgactttggtttatattgtttatattggctaagtgctattagatgatttcttatccctttaaaatagtttttgttttgtattagatatagtaatagtattagatgagtcactttcctagtgtcccatctacattctggttatggtgtgtgaaatacaattatatggtagaaagaggccctgactgtcccgtgaggtcagtgctgcagtcttgaaatctcatcttaattggagggtataccctcaaggttaacgattctccagagtgtttcatctttaattttgtacatttacatgtatttgtgtagaataaaatatctatcagatatgtgtaaaatatctatcagaaagtttgtaataatagcagttagtgtataaggtgctgtgcactatttgcctgaaaaattgaagtgtgtaacttgacattatatagtttaaaagcaaaacgtcaatagaatcactaattgaacaattttgtaagcctttatggaagaatatcctattaaatgtctcaaactttctctttctgtaaattgacatgaatcatctttattgtatatgtattttgattcatgtttgcattgtaaactgggtaagtcaggccagttaacattgttctctacagtgagaaagaacacctgaaatcacaaagcacttaagtgtgtcttgcacagggtctgcctaatctacctgtgtcctgtcagctgtagtgcaagcgttgacctgagcacctggctgtatttcatgtaaggatctgggtagattttcttttatcaacaacatgtcctgttaagcaagacagataatatcttttccttctctgactaaaagtgttttgggttattttcttttttttttcttttttgcatataaaatgtgatgacagtcaagtgtttttttatagctttaacatttattcatatcagtcttttggttttgaacatggcctgagattatgtaagaacactggggaaagctgactggaaggtgttgtgggaatagaggagctgtctttagaactgttgaattttaaactatttcaagataaatttaaaaaaaattcacctgtgtaaactgtttctaattttttgttttgtttcattttttggtcttttgtttttttgtgttttgtgttcctttgatccagagttgaagtttatattctttggacagtcttaaaataagcattggttgaatgacaacacccttgtagggaagtggctaagtgtaaaagtcagccgttctcatgaagtgacaactgctcacgtggccagcacccaggtaaagagatgagtgaacagtgacgcagggttaggatatagccagagtgtgagcacagctgtgctgggaggatacaggacattaaggaacttcgtgtttttcttttcatccaaagaaattgttttgggatactgtaattgcttaatgatgacattgcctcattataaatgaaccttcttaattagaaattatacaaggatggaatatttaagctttggactgtgatgttatatgccatatcaacagcgaagtgtgaacacaagtttatgatgacaactgctaggtaatttattgtccagagctcatcgttccatttctggtgagtgaagtaggattatatatgcctgcagagctagcagaagtcttgccagctaaaaactatccttaactataaaattaatactctcaacatatcaagcctgaggaactcaaaaactgagacatagtggaatattttttcaatgtacagccaagtcctctgaaggtgaacttgtatatttaaggtggagtagtatataagcttgcctgatgttttatttatttatttatttttaatgaggtattttcctcgtttacattttcaatgctatcccaaaagtcccccgtacccacccccccaatcccctacccacccactcccctttttggccctggagttcccctgtactggggcatataaagtttgcaagtccaatgggcctctctttgcagtgatggccgactaggccatcttttgatacatatgcagctagagacatgagctccggggtactggttagttcatattgttgttccacctatagggttgcagttccctttagctccttgggtaatttctgtagctcctccattgggggccgtgtgatccatccaatagctgactgtgatcatccacttctgtgtttgctaggccccggcatagtctcacaagagacagctatatattcctaccgtacagatgctctttgggagttaaaaaattctcaacttccatggaatttttaggaagttccacaaattggaggtgcagctagatttcccagcctctgtgctgaggctggtagctgcttccaggttgaaaggaagaaaagtataacgtccatttccccagctgtgagagtggatttcgcaacctgctgttttctttttgtttcttcccatcatctgagcaggcgtccatccatggaaggttgatgtgtctgaataaccagagcagggaaattcttacagttggaatagtaagagactgttgggtgacagaaaagaacttgctgattccttttgggaaagctctctgcagagcttctgagcctggtcaaatgagtgctccaaacacatcagcaaccatagtactgaagttgctcttgagtcacttatggacttacatacctgttactctcttttgaatgcagtaattaagagactcaggattagaatcttcccaatacattcaattctttacacaattgtaaactatagagataggtgtcaacataagtcatgtatatgatgcataggaatattcatttggtacttttgagtatacacttactatcattgctttctagtcatggaagaacagtgagaaaatacacattagagaaaccttgtgaagtttgtgtatcagagtaacggataaactcagactctcaccttacctagcatctcagtggaaacctgaggtatacctgcagggagagtgatggacagagaggaatgggaatcatctttttaataatgatcactaaaatcatccatggcctttcattttcattaatatacaagtaaaattaatttgattttatccaggtcaaacaatttatctctgaattattctcttgaacatttcagtgcttataaaataaagacaaaacccatatggttataaaagtgtcttcactgggctccatgggtgactgttgcctcagaattctttctcatttaaacattaaaatgtctaggtgggggataagctgaatgaaataaatagaaggatttgttttgactttgctagcaaagaggacacacaggccagggagcctgttgctttgattagcatgtccccctaccacaacacacctctgctgctcatcctgttgtgtttgagaatttgacattctatccttctttttcatggagtatttaactttaattctaaattgtatggcattctatttaatccacaactggttattactgcttagatgtagtcagatacccagagttgacatcctgatcttgctaattttctgtgagtccttctattgctttcctaagggttctgtaacagagtacctcagattcatgatttaaccaacagtgctttactgtcctacatgcctggaggctaaataaggtgccagacacaggctctcagagatgtcgaagggagaatcctcagttgcctcattgccctttccttgcttctggtggtttccagctctgtgacttctagtcacatcactaaattaaacattttttaatagtgattttatcaatgagactaagacattgaagtgtttagattaaaagtcaaatctcactgtagttttggaatgaaatgcaatttgcagattgtaaaaattcttaactgctacatgtcacagataattcaacctgatatattcagataattataacttttgattgactatagtatctaggagtgtttgagaattttttggtatacattgttaggcctcaaattttaactggtttatatcagactcagtagaaaaactggactaaaacattgcccataaccaagatgtttatgtcccaggtctgagtagggtgtgataacttctacttgtaactccaacatgatcttgatgttactgatgctattccattgttacctcttgttaacactggatcaggctatatagtgcacaggaaaacagtgaacacatccgtcctgttaggtgttaacagttttcacagagtgcttcagagcatcttctctcctttttttgaaagaaaaagtcctatgaactacggaatgtgcgtgcttctgttgctccttctcttctttccttccttcctccaaagtgagctgctccagagtgtaatctctactgtccagctgcacatgttcatctcaaaagggaaagctttcttttcttttgtgttttagcatttttttttaaccttctaagatagggtttctctatgaaatgctggctgtcctggaactagctctgtagactaggcagggcctcaaatctcagagcctctgcctcctgggtgcttggaataaaagttgtggctaccaccacccagcacatattttggcatgttttaaatcacatatacgtgataagtatgtatctttctgctcccatctgctcatggtaatcatctcctactacatggtttgctttttaaaagatgctaataaaaagtagttttattaactctttgagaaactcatccaatgcattttgattttattcacctcctttcccacttcctcgaagaatcattccaacctccacacctacgacttgctttttgtttttttgtttttttatttccagagatgcccttggaatagaaatccttaattttaatgtagtcagtgacaccagttttgcttttcagtgacttctgtctcctttcttgacgttctcagtttctcaagtaacttttttaggtctgcgctttatagtaacagtggtcagtagtcacatgtgactgctgggcaattgaaatatgcttagtctgaattttaagatgtgctatatgtcatattatgcaggatgtaaaatacctagttaacaagtttcagatgttagttagctagaatgtagctacataacaagtttgtttcatatgtatactctagaaaaactccaaataacaaaactagctcacattgtatttctagattctagaagtatacttttcagtagaacttactgtggtgttgattgtattctttgtctgtgctgtcccagacggggacccttagctgcatgtggaggaacgacattttaaatgtggctatgataactgagaaacttaattttaaatttaaattcaactcatttagatttgagtacccacattcttctaatagctcctctattgactcttttggacactctcctgtttaagcattcatttctgaaatttagcctccaatttttatctgtggttgattctgtctatggtgttagatagaggtcaacaagggtatttctttcttctatatgcaagttgagccagccaaataccaaggaaaacaatatttaagactaccctttgttcctttggtggtctccttttttatttttacatttttaattttaaactcttacctgctccctgcccccatgccacacaagtttgccatggccattcttacccctgactgttttcacataaatattaaatatacttcattgcttttcacaaagaattttccaggcttttgattgagattgtattggatctgtagtttacctattcataagcataacatagctatatattttacttacatatttaattttgctcaataatgtgtgacttttttctatgggccttacatatgttttattagattatgcctagatatttgtttgctattaataatttattactagtttcatgttctagttcttctggtatatagaaatatatttgattttaagttattcttatatcaagaatctatagaaaattaacttactcttggatttttattgtattcaattctaagcatttgtgaatactgagaaaattttcctggtttttaaaacaattttactcatttttaaaaaaaatattacttgtgtggatatatgtgtgtgagttcatttacccatagagactggaagaaagaagatactagattctcctggagctgaagtttcagctggttgtaagctgtgcaatactgcagctcgtaactgatttgagtcctctgcaagaggagtatatatttatttatttattattattattttttaatctttttttttaattaggtattttcctcatttacattttcaatgctaccccaaaggtcccccatacccacccccccaatcccctacccacccactccccctttttggccctggcgttcccctgtactggggcatataaagtttgcaagtccagtgggcctctctttgcagtgatggccgactaggccatcttttgatacatatgcagctaaagacaagagtatatatttgttctaactgttgatccatctttctaaaccccatttcagttatcttatttgttctcatattgctgccctaaccagaacctcaagtgcaagaaccagcaaacttcattttaagcaaacaataaaaatgtatatggagtcttcagtgttttaaaagtagtcaaagtagtcctatgtcctgagaagtttgtattaattaaaaggactgtacactaatacaattaaataaaaggggctatttttcatagaggatattggtgaaagaatgactatagtcataaaggaaatgagataaaatacttggttaatggattggcaattgcaaaataagttttcttatcttgagtatatgttggcatacactaatcagctgtctttttcaatccctgtaggaaaagtagaaatgaaggtgcatatacacacaaagttttgcctcatctgtttactgacatttattttccatcattgcaaccactgccatgaagaccatgaccatggccctgaggagcttcacagacatcatcgtgggatgacagagtcagagtcaagcaaattttcagtgcaggatgctgaaaatgaaaaaaagtactatattgaaaaactttttgaccgttatggtgaaaatggaagattatcattttttggtctggagaaacttttaacaaacttgggccttggagagatcaaagtcgttgagattaatcacgaggaccttggccatgatcatgtttctcacttagacattctggcagtgcaagagggaaagcatttccattcgcatacccaccagcattttcacaatcatttaaatgcagaaaatcatactacaaccagtgtgacatcaaaaagaaaccacaaatgtgatccagagaaagaggcagctgaactgcccatcaaagctgatgataaacacctgcatgaccgcaatcaccgcttccatcatcgccatcgtttgcatcatcacctggatcacaacactactcgtcacgttcataatgactccgttgctcacagtgagcatggggagcccggtcacagcccttcaccagagaccaataaaacacaagagcagtctgaagtgaagtcagtgaaggtcaggaggaaagaaaaagggaagaggaagaaagaaaactcggaggttaatacaccaggtttcctccccaaccatgatcacagtgaacaatatgagcataaccgggttcacaaacttgaccgtgtacatagccctggccatcctcatgcgcatcttcctgagcacagtggtcatgagcttggccatggacaccaagaacttgatcctgataatgaaggtgaacttcgacatactagaaagcgagaagcaccacatgttagaaaaagtgcaatttattccacccctagccacaaagaccagagtgaagacgaccgccagcatgaagtaggtatacaaggtggtgtgcagtggtgtctgtggtggctactcagtagttcttataggtgtggagcagttagataaggagaaggttaaccatagagcagtcgcatcacaactcagccatgtggagacttggggaacactgctagcagaattaaggaatcaaaatcaaggttggaaaattttaatcagggttttatttttatttattctcaaatttgggttcctcaagcctagtctaaatatttaagtgttgcttgataatatatcctttaattcattttattatttgttttatgaattctgactctccagtagcagtcttcactgctaatattgtagctggcttctaaataccagaaaattaaaacatgtttgctcttgttcaacatgatctttttagaaatagctaacttctcttgcataattactaacttattaaaagaagttacacttccaagtcattgttttagcttctgagtttttgtgaatgcattgggcttctcttctgtattactttttgataaggcctattgtgatgtcagtctttactgaggcccttcacagacctgggtgaatgcaaaatatataatgattggaaatcccaggccttctgatgcactcttgtttttctcctaaatcttcttacttttgaaaacttttctaccttcaattatgtccacagttctttaaaggtgtatttcctttttggtatatgtataccaatactattttttattctgattttgtaacaatcttattacaatttagaaatgtttgttttatgtatgtttctatgaatagtaagtggcaccatccaacatgggaaataaacatgtattgcttttgttactgctttgcagttaggttagtgtgcatctgagtaaattcagaccatttcttctttggctatgtcatcagatacgtgtttccagcagttataaacagtggttttaacaataaaatatataaaaatcttagtgagttttttaaagtgtacttttatcattgtaggtaagattgtagcaccttccctagatgaaaatggtatgcacatttactgtgtgtatcagagcctgaggtctgcattctcagtccgtggtctcgtcctcatggctctgaagccctgacacccaggagactttgaaaatgtctttggcattgagtagggtggtacttcaccattactaagacctaagagtaggttttgattttgtgtttatggttattttttgagttattgataaaatgaggtactatgtcagtaatgaagcatgcaaccagactgggtaaacacaagagaaaaaaaaagagttcagttctctctctctctccctctctctcttccttccttccttccttccttccttcccctctctctctctctctctctctctctctctctctctttctttctttctttcttctaaattaattcatatgagtacactgtagctgtctttagactcaccagaaaggggcattggatcccattacagatggttgtgagccaccatgtggttgctgggaattgaactcaagacctcttgaagagcagtcagtgctcttaacctctgagccatctctccagcaaccagttctttatcttaatttttatctagtgtttacttcatggtaaatccaaacttgggtatttctttcttctttgtctttgaaatgtcagtgggtaaatcttttttttttcctttttctttttttctttttgtgccaggattaaacccaagacctggcattgaggagagcctcagttcatggtctttctcatcttggtttccctcagctcacatcaggctagaatttattgatttattttttgtcttttggagtgtgtgtgtgtgtgtgtgtgtgtgtgtgattctgtgtgtgtgtgtgtgtgtgtgtgtatgtgtgcatgtttaatggattgttactattttgctcttatgataatcaaactcattgaactaaatgtgccccagcattcaataaaacatttcttctgcaatgcctttggcaggaaaaaatatatgtgctaatggattttgagtcactgatactgcagtttggtaaggcagagcccttctgatcctgtacgaatcttgggaacatggttgagtcatatttcatgtgttggaataggaaaaagaactctagaaattctctagtaatctagtagtatatctccctattttaattttttgcataaattcctatggaaagcatggctcttatgtgtttgtattacagtatttcaagtgatatttagagtattttaattgtacaataacattttctgcataatcttaaaaacctgcttatactcagtttgttttatccgtttccttgcagtgtttgaacgtcactcagttgttaaaacactttggtcttggtccgaactctcccatctcaccggatctattcacgtacctttgccctgcattgctgtatcagatcgacagcagactttgtattgaacattttgacaaacttttagttgaagatttaaataaggataaaactctggttcctgaagataagacaaatataggggcatcgggtaagaaagacttttttcctctttaaggtagtactcatactgtcccttaaattatttattaaaaagaaagactaaattgttagtttcatttcagtgtcagattttaatgatccaatcagatttagatatctatataagatattggaagacgccaagaggcttattagtatttttattttatttcctctggccctgtagaggagtgttttgttgaaaacagagaaaaagattaaaaaggaaatagaaatctttttgacaatcagccataaaatgggaactctgattaaagttattttccattatgttatttactctttagcaggttctggcttcatgaaaagcaaagatgattggattttaaagaagtaaaatggggaactagaggctaacagatgggagtgtctcaggcatgccacacgggtggcacgtgaacttagtcttggttactcttcctggttccagttagatgacaccaatactgttttgagactgtgcctaggctgggttggctgcccaacgtaactgtctagacagcgccactgtgatattcacacggcttctctcatgacattttaaaactccaccatgtgaaaatgtgtagctctcttggatctgaaccacttccattctttgatagaacctagaactttttgtttccctctgattttcttctttccctctttgtttttctgtagttaggagtctaatcatacatatcttctaactccatgcattctgttataaactttgcttgtagttatcttgtttttatctggctttttgattgtcgaaagcttcattaactttttgcctatgttcctacccctttcaagacatctcttgcgcttaaactagatttatattctaaaatcttaagtgagctcctccagcatagaagtttgtgtttacttgtgatggttagcgttacattaatactttagtttatttacattacaaacacgtattctaggcatctttctaaagtcagttaatgtgcttctcccagcagtcctgtaactttccattgcatagctgatactttatctttttctcatgtaaactgtactgtgccatatgatctctaggttagaacttagctttgcttggggctcaggctttctgtaccgctcacgtactttctgcctttgcatctgaatccctacataagtaatagaaatgcctcttatgtagcgttgaccataggtcctgctgttcctcactctgatttattaactcctcaaaaaagtgaggaggtggatacagttatatgtaatagcacattgacagacttgtagacctaagaagaaagttgtaaaagcgtactggtataactatggctctaagtgttgattagttgtcaagaaaatatactcaagaatgatgataagaactggatgtggcttacgtgccctgcagtcaaaagaacttagaaatcagagacaggtggctctgaatccaatgccagcctggtctacatagtgagacactgtctctaagagcgggaaggaaaggaaacccttcatcctgtaggctggaagagtagagacagtgagtccacagttgaatttgaatgttcattgtggaaaaaatacagtctgtcctcctccttgacctcacacatactattccttgtagatgagagactgtccttctcaccaacacaaaaggggagtcagagactaaacctaattgagaataaaatgtactttttctctatagggaaaaatggaaagtaacaagcttgtttcctttgaagttaaaaccaacagtgtttttattttgaaggagcctaaaaaaataattcagttcattgttttcatgccaggagtggattagggctttttaattagtgttgtctatgttgtaatgttgccataatgtatagattgaaataaagctgttgacaggtatgtaacaagtaatacaggaagttacagcttattcaatttgaaatccttagaggaaattgttttggaagcaagtatgttacaaatagggaatattgattggttgtttgcaggtggtttttagcattgttagaaatgcagcttgaattaattatgtcctgatagatgttaataattgttagagagaatgccccactagtaattatttttaatgactgctgcaccattaagaaaggttaacttgttttatataaatctcccatagtgactcagctactacctcattaactttattcaaagattgctgtaaaccaaataccctgaatagtgtgcatggtagaaatcgtttgtttcacaagattggctcatttagtcatagagttgaccctagcttaattaccaaggggggctgtgaataggctgctaagcattttctgccaattaaaatgctgaaacagtgtagaaaactgccgtcttgcacatgctttgcaccaagttaattagaaagtttccacagatgagcgcttctttttaaaagaatgcattttctctcctggtaatgaggaaaggagttggtgaataactaagcttgaagacctttaacgtttctagcaacctaatttgtggactaagtgaagcttgcttcagacacttagctctttttattacatatggtatcttgagtacaaataaagaaaacatttgctagttgtatttaatagtttgcatattgcttgttaggtatgagttttctaaaagatacctttccagctgtgttatactttgttttataccaaataaattgtgattagaaaaggacagtaatttgattagaaattggaaatttctgcattgctttttttcctctggtgtatttaaaaaaattaggagcttatgtaagctaaaaatcagtaaactgcctggaaaggtatttctaaatacagtatattaaaaactaaatataggtcaaaagacttgtttgtttttttttttcttaaaaaaaagattaagttgctagaaaaatgtatgctcaaatttatagtagtagaaaacagattatttctttgaaaaattaaaagtaaacaattgaaggaggaagtttctactagcaccatgtgtacaggagtgggttgtgctggttctaacatgaaacagttgtcatggagtattgtcaactatagaagatgtccgggtgtttctgagtgtttgtttgtttgctttaatgtgtatgcagtatgcctgcatatatgtctgtaccatgtgcatgccctgtgccctcagagaagacacggaatcccctgcaattagaggtccaaatgattgtgaattactgtgtcggtgctgggattgaacccagttcctcttcaagagcagcaagagctttaaccactgaaccatctctccagctgcctgactttattatatcttaggacgagcagaaacaggtgataattcacagttgataaattactaaccttactgctcatgtctagtgggcttgaataaagtgtaagtcctgtttttttttgtttggttggttttttttgttttttcgagacagggtttctctgtgtagccttggctgtcctggaactcactttgtaaaccaggctggcctcgaactcagagatctgcctgtctctgccagtaaattttgataattttatgaagttacgtaatgttgtcttcatctttatcataattagctcacatatgcaagacagtcatttaagttaacatttcttctttcaggcataatatacttaatttttcttacctatcatcttttgtgtatgaagctccctttagtaagtaaatcggggatatatataattcttggctaagagttctctgacagtgctatgatttgatgagaactgtaggattagagaactggctcaggtgtccttaccatcccttctttgactgctgtggccagccctgtctgtcctctgggatcttatgcttctggagcaaatccctagtcccatgcataattttgactttttaaaatagctaattttatgttagattttttttttttaccacagtttttaaaagttaagccaataaaatgggaatttttttcttccctttttagtgttaaaatataacaatttgatcttagttattattaagtgtacaatacactggtgtcaaatagactcataccaatacatctacaacgatctctacaactcttcatattgcagaactgaaactttattcccattaaaccatagtttctcatccctcccaccatgcagcctctagaaatactgtatctgtattcactaaatactatgaggccagcataatgacccagtagcaaagccaggcaaagaccctatgtggaaattagagcccagtgttccttacaaacatacatgtaaagtttctcaacaatataccaaagatcaaccttcaaagtttctgatgagaaatctgctgatagccccactggggagccctgttgtgtgatgggtgagttgtttcatcttgtaacttttaaagttcctctttgtttcttgggagtttgcgtatattgtgccgtagtgtggatttcctcctaaaattcatcttccgtcttccctctacttttatatttctgcttgttgtccgtcaactttgtgacgtgtttagccttgcttcttcacatactcttttttgttgcttctttctggaactccattgtgcatgccagtcattgtgatggtgacccaaaggtcccttgcaggttgtactcacttttgtcagcctgttttctttctctctctccacctcagttaccattgtcctgtgttctaggtttgttgtttcttctgcctcctcaaacctgcctttagatcctagtagccggtttttacttcctttattattattatatttcactggcttcagggctcctttagtattttatttaggttttctgcctctttatttccattttgtttatatattgttggctgtatatcatggttttgttctgctttggagcacagtgatgtcataagctttctcatatgtgggctaggcaagatggcgtatctccttgactcacttatctccttcctattggctttttagagctttccttttgtgctgttgactaacgctgactgtttccctacagcgtggatctgtggcatcatatctatcaccgtcattagtctgctttccttgctgggtgtgattttggttcccatcatcaaccaaggatgcttcaaattccttctcacgttccttgttgcactagcagtaggaacaatgagtggagacgcccttctgcatctactgccccatgtaagaaattgttttaatctgccaaaagatacaaatttgtggtactagtgttgagtgtccttgggtagtgttgctatgtacttgtacttgtacactgtatttatacactaatagtgtacacaagtttgctaaattgtatgttcttataggttgaagtttgtttttctcatttttgcagttttaattgaagtatttttaaataaattgaatcattgggttttaaatgggaccaggagtgaaaggtcatctgatctttctatacattaagaaaactgttagaaaagtgcatatggtatgttgtaacgatggtatatatagccaggagggtacagtggtgaactgctttgaaatagctggcgattttgttttatttttactaagtatttgtgattaagtggtattaatttatgtttacaaaggactcattaatttttgttattttgggttcattcactcactagtatttttctaacccttagaggcatttgtttataatgaagtataataatgtccaggtaataagccaaggaaattaactgcaagacaactttatatactgtcaatgaagcactttgagatttaaaaagttatgaaaccttgagctcatagaaggtgaaactagaggaacgtgaaggacgagggaagggctgggtgggggttgtattgtcagtggttcataagttatgttatgtgggagatgtaagctctgcatataaggggactgtaggtaaggatgaagtgaagacaggtggaatataggtaaggatagtgtgtgcgtgcttgtgtgtgtgtatgtgttagtgaaaggactccagaagttttttcaccgtaaagaaatgataaatgtttaaagaaacttaatatgacttaaacattgtataatacatgcatgtatcaaaatattcatgaaacccgataagtctgtataacttttatataccaaccagaagcttaaaattagattaaaaattttaaatctagaggataatctttctatgtcaataagatgttgcagtcaaaaatctgaagtaatttgagttattttcttcattatctaatagtctcagggtggacatgaccacagtcatcagcatacgcacggacatggtcattcacatgggcatgaatctaaggagtttttggaagaatatgatgctgtgttgaaaggacttgtggcgctaggaggcatttacttactgttcatcatagaacactgcattcgaatgtttaagcactacaagcaacaaagagtaagtgctgctcacaaggttgtttacttaggtacagatctgaagaaaaagcacctctttctgaacacattttcttaactatgatgttggtgtatagtgtatctctattctttatttttcctgtttctgatctttgtcactttgtgccattgcgtttactttggcatttataatcaagatacagcagtgtctgagatagcttgtgtttcatcatacctcacaagttaagaagaatgggaaaagctggtgacctgtttttaaataagcatatataaatgaaaaagaaactggtctcatcagtctatcttacaatgaagttttttacataacacctcctttaacagaaatacttcacttgtagtagaagtatccgagggaagacgaggtcagaataatagggcacactcaggaaacagtagagacactgacagagagaaataatggaagcactaaatctttagtattgatccaccatttgggagaacttgactcagcaaccctggttttcatgcagctgtctttgatgtttcacctatgaaaacatcccccagaaaattggtttaaagcccctactgttctctggtttaactgagttcacatttgttcattggcataagcagcctatcacagtccatgctagtggcatggtcaaggtagtgacacacagatggctcgaggatattagattatatttaagtaaaactttccacaaatggacaagagttatacatttctatcttgttaattccaaatattcttttcgagttctctgggtagtcataattttgcttgtttgcatttctgcatgcacaaccacatttttgtatgtatttaagacaaaagtgacttggcaaagatctgtgaactgggatcaggagagtgattctagtctgtgcagacattagctatgtgactgtctttgatcttcatgatctccagttaccatctaaacagggatacattttattccttagcttatcacattttaaatcatgtacttaattttgattgcttatctccaaaggagtactgattaagatgaggatcccagaaaaaaatattttctttggcctggtagaagaagctaaaaaaggaaggggttaagagaaaagtgaagtgaatctaattatataataatgtaatctaattgcatattatgcctgaaaggctatgtgaaggatacaataattatttctaagagatgaatggacagtaatttggtactgaggatgccaaagcagggctggctggagggatacaggagctgttgatggaaccactgcagagtaatgtggaaggcaggtgataggaacttgggccagaaggtgctgataggaattgttgaagtagtattggtaagagagttggtgaggcttgataagtgattagatgaagtaaaggagagttgaagaccatgtctcctaaaaagcatctgactatctcagcagatgcaggaaagaaacctggtaaaatcatcatcattattattatcattttatttttgtgtgtgtgtgtgatcaaaaagacatcgtttgagtacagaagtcaagtgcacctcagcacttcagcaggtgtttgtgataaacccgcagccaacatgatgctgagttgggaaagctgagaatgtatttctttcctgattcagaccaacagtatggtactagaaatcttagttatggtggtccaagaagagacagtaacaacagaaagcatacatgcaggatggaggaattcatagtattccaatttgtagaagatgagattctgttcacaagaaaacctagaaattctaccaaaagattagcaaaactgataaatgcattcagttaggtttcatgctcaaaatcagctgacaaaatactacatgagccttgtgagaagggcactatgcaagaaatcccgttacaacagctaccaggttgagagggggaaattaggaaacagctgctttcagaagaattagtattgcttccatgttcataaaacccagaccaatctgcagattccatgaagcactcattgtggggaatggcaatccttgtagatctagagaagtcatttgtggaattcatgtgggagcagactccccagtgccaacacagtctgaaacaacaggaacaaagaagctggagggctcacagttatgacttcaagacaggctccagagctatgataaccaaaacaacagtaaacggtgctggaaatcctcaggcaaaaggttgaaactagagacctgagagcataaaactgctaggagaaaacaagggctattggtctaaactgtgattttttttaaaatttatttatttatttttaagtatgaagcccaaagtataggaaataaaagcaaaaattgattagctgtgtcatggtgaattgtaaaagcctcccgcacagcatagaaaacaacctgcaggatgtgagaaaatactcaaaatgatcatttaatggactaatgtccagaataagcaactcaaaagcacttagcaacacaaacaatccagttgaaaacagcaagataggcatgtgtattagacacagtcaatataaagataacaaatactgacaaggatgtgggcaaaagaaaatcattgcatggcagaggaagacacacaaaatactctagccattatgcaaactgtctgaaggttcctcagaaaactaaaaatacacccaccacatgatcccacaatcccagtactagatatatatatccaaaggaagtgaagttagtattaaggaaacacctgcagtccagtgttgtagcataatagctaggaatagcctaagcgtcccatgatgaatggaaagcgaaattatagaatatatgcaccatgggatactatttatacataaacatgtgtatgctacttgcaacaaggtgtatgggcctagaaattgttcaggttaatgcatagtaggttgacaataagcaagagtaatgcaccttacagttttaaaagcttcaggaggtcttgcatattccttctacaagagatagggtttgaggtgataaatgggcttaacctgctttagataatcagtgtatccttggatgaaaacacaatgtaatatcccatggatatgtagtttttattttttaatttatatgttagaatgggcaaatgatatgaatagaaattctcaagatgtatgaattaccaagaaatacatgaaacagcaaacaacttcctaagccttcgagtatagttccttatgaaatgtatgctcagtgtgtgaggccctgggcttaagcttcagaaccaccaggaaggaaaaactagtggagttaccatctcacccagtcacgtggctttagtcagtatagtaatcttgtggtaacaatgtgctgtgaaaaggactcccccagtgttgatggcagtataagtgctatggttatggtggaaaggagagaagatccctccacaaactaaaagtaaatgtactatgtaaaccagctgccccacctcttagtatgtctaaaagaaatgaaaccagctaaaaaccagttcctgcctgtcatatatattgctgcacgactcacagtagctataataaggaatcagcccttgtgaatggagaagtagctggtatagataaagaaaagaatgtttcaaccacaaagaaaagtgaaattttatcaagatacatgggacatgcagatacgggatgctaaatgagctaagcccagaaagacaaatactgcagactcttgtgtattgacactgacagcttgcatgtagaatagtggtttccagtgggaagatggaaaaaaataactgaaaccacaactcagaaagaataagtttcagtgtttttggaacctagtggtaactgtcgttcagagtgatgcagtctgtagatgatgaagctcctgaagagaggaccacaaaggctttcaataataaatgataaagaggcgggaatattgattaccctgctttggtcagtacataccaaatatcaaactgaactccactgatatgcatagtgactgtcttttaaaaggaaaggatgctcatatatttaagtaaagtagaacaaagcactaggaagatacgatagccagtaaagtgcttgccatgcgagcaggaggcaactttagtctccataccccacagaagctgggcatggtggtgcacacctttaatacatcaggctagcctgaagttccagcccagtgagagaccaagtgtcagaagaacaggaaaatattgggtggatactcctgaggaacaacacctgagatggacctctggcctcctgcagataggtacccatgtgtccacccacatatacacactcacacatgcatgtctacatacacaaaagaagagaaaaaacccacaagactatagtaaaaactatattacagagtatgctgtattgtgttggtcaaggccagccaaaattctaggccctaggatagacccatatccttataagatgcagcaggggacttacatggggagaaaagtagtgcctatttttggagactgcttcaggcccaagtagccgaacaagcatacacacagcagttagaatgatcacacacctgccttggagtttacatctgagaaaccatcctgaaagtgcacttggccaggcaggaagcactccctgagagcatgagctcattttcactgctgtaccatacatgcttctttaaatcaggatgggaggaaagcagaagttctaatgggaagagttcttagtattggtagttacagtgacaaaactatggagtaaaaagccacattgctaagtcagagagaagagttcaacctaacccatgcagggcagcagttagtaccttaagcagttgagaatggaatcatacagttgtctgcttacaaggtcagaaggaagaccacttggattcttaatgatttttttgttaagctgttaagaatcggtgattgtcatactgcttccatttggcaggtgagttgtcacatgttctgtgttaataagcgtaaaccttgcacatctcagaagccagctacagacggagagttcaggcttaggtttgactccttcatggtcatgcctcatccagagaagtgagagattacattgtaaggtgagagtgagcgtgaagattagggactcactgccacttgatactattgcagtggaattcgatgcagtagttcacacatttcatttgggttgcataatagtttggtactttgcactctattaaagtagatgaaccgagccagtgagatagcttagtgggtaaagaagtttgcagccaatcctgacttctatacccagcatccatcttatataaaaatgggatgataaataagtaatctaaattgttagcatcaattgctcctaaaaggggggggtaataaaggcatatcattactagttattgctgcagattttatgccaataccaatttgtttatttgtttgtttgtttgttttaaattcccacagggaaaacagaaatggtttatgaagcagagcacagaagaatccactattggaagaaagctttcagatcataagttaaacagcacaccggatgctgactggctccaactcaagccccttgctggtatcaaactattccaatgaaaaacctaaaattgaaaagttgttcctatacaatgtgtttgaaatttcttttctttgtggttttcctactgtgatcctcctttaatgtgagtgtgtcttgtaattacaattctgttcatgcaatggaaccaggtatattaggagcaaggcaaacttgccgcttccttttgaaaaaatacgtgagagaagtgaaacaagggtcaggcctggtggcgctcacctgtaatctcagcatctggaaggctagggcaggaagatcttcagttcaaggcctgcctaagttacttagcaagagccctctgtttcagtgtctcaaaaagaagaaataaaatgcaaagccactctgtatcaaaactagaccaacccacagaattcagcagtcttctgtgtcagtgttagaactctccgccctctgcctcagttttcccagtactgggattgcaggtatgcattaccacgttcagtgagcggtactcttcttgacagggtgcagtttcctttatccgtaattgggtatagaaggaaaatgaaaagttgcctctgtaattaaagaagaatagcttgcccttgtatttacaatccacatgttatctaacagaacaaggtggctcagacagttaagattttcttactctataccttcagcttgcatttgagtttctctttctcctccatgtgtcagtggttctcagcatagatggcagccttccctagctgtccaactctcccaaaagacaattgggagttatcccggtctctgtcataaaacaaatagttctggaaaataatctttttaaaatgacttaccagctgtggccagaacattccaatgaagacctctgaatagtatattgttggtggagcacatgtgtagagaactttgccatcagctgacttgggcaagtaatttaaattttagctgatgggctttagaaaaattattctaatggattgagttttaaaatgcataagggaaatatattcatttaagcggtgttgacctcactgctgtcctgcccagggttagattagcacttgctagatcagcatatcctttattctgatgtaggaacggatgactcggtagtctctgaagaccggcttaatgagactgaactgacggatttagaagcccaacaagaatcccctcctaaaaattacctgggtgtggaggaagagaaaatcatggaccattctcacagtgatggactgcacaccattcatgagcacgaggtccacgtgacctcacataaccaccatgatgaggataaagcagtgctgaggaagcacagccaccagtggcaccacagacacgcccatcattctcacgggccctgccactccggctcagacctgaaggaaacaggaatagccaatatagcctggatggtgatcatgggtgacggcatccacaacttcagtgacggcctcgccattggtaagtgtcctggagcttgggttacaatgtatcctttaagcatattttcccattcctactaagttcctactaaccttacaagctacaatctatacggttaaaatttacctacaagttttgaatgtccagctgtatattattactgccatttctattttctctgaaagatatggtatttgaaagtttaaaaaaaaatgaaattttagtactttttagttctattgaagcaaagtcagattactgaaactgctattttaacataatcgaactcatagacacccctataagagtccagtataatttcagtcttgaatttaataaaattttcacagcttttgaaaagtttcacattaaagcccacaataacaaattgacatacatgtatgaactatacatgccgttgctggaatataaactaatgactaatttagaacattaactgtcaccagggcatgattctctttgggatctttcccccccccgccccccccgggcccctgcccccatgaccggatttctctgtgtagctcactttgtagaccaggctggctttgaactcagaaatccacctgcctccgcctcccaagtgctgggatcagaggcatgcaccaccactgcccggctttgggaatctagattttattagtcagaaataagctttggtttccttcagaaagcaaaggctgtatttttttttataatcatagtagttactgatactaaagcatactgacatctgctagtgggatgagaccttacacccccagtgtatgttgagaagccatgatgtataagtggggtgagtcaagtacagttgaagttcctgcagatagaaggagcatctcactgacagtggaggaagcgggaggcctgaggctcactcactcactgagccctgtgttcatcatcctctccaggggcagctttcagcgcggggctgactggaggcatcagcacatccatagccgtcttctgtcatgaactgccacatgaattaggtatgagcctcaaaagtcttactgcctttcatcaaatctaggcttccttcagttgtaaaatgtatgaaactgcggagatgctaagacagaaaatctgctgacaggtgcagagtgccatctatggccaggcatatcccaatataagactaaaagtaactgcttcttgtgtggaagtatcagcgcctgtgtgctttttactgctgtaacagtggtactgttaaaaaggatcatacaggggctggagagatggctcagtggttaagagcactgactgctgctcttcctaagttcctgagttcaaatctcagcaaccacatggtggctcacaagcatctgtaacgagatctgatgccctcttctggtctggtgtgtctgaagacagctacagtgtgcttacatataataaataaataaattataaataaataaattgggccggagcgagtagacggagtgagaaggagaaaaaaaaaaaagaaggatcatatataatgactaggttggcaatcataaattaaaaggaaatatttctccaatgcctgattgtggtgttaacccttttttattttatttcatgtgccatatacgttttattttcttaaaggaacagggtaaagttttctattacataattgaaaattgaaccagaggaacctaagacagttatttcatcacagatgatggaaagatcacactgttgtccagacactaaatagaatgttgtttaaagagacttgggtgtgtggatggttattatagcaactggaaaatagtttctgactgtcactctttaaagaccactgaggttttggaataatcattaacttctagtcgtttcttttttttaaaccatcagctttgatgtttgcacaatcttgtgggcacgggtgcgtgcctgtgtgtgtgtgtgtgagtcttacatgattttaataaagtaggaccctcaaaatgctttcagggtctttctctctctctctttttaacattttcttgctcatgattgtatatatgatgatctcaatatccaaactgttttgtgcaggttcttattttcctactcatttcaatttccctgtcattattgataatgatgtcttctgtttattttataattgttattaaatgttacagtgagaggtttggggatttgttttgtgttggtgagataggatctaccatataacccttgcagctctggaacttgctagggagacaaggctgctctgtgtcagcagtcagctttgccttgacctcccaagggttgggattagaggtgtataccactatgcttgacccaaacgccctctgatgctaagcagtgtgtttagcaggaaagcaatcacatttgataaatgaatcatgttattaggactcagctcagataagctgtgcattttccaatccccctcaagtacagcagagattaaacttaagttctctgtaacatgcttaattgtctaaggagttgtctaaggaaagttgtccattcactatttagatctatacagagttttatcttagtctttattcatttttgacatgtagatggtttgctgtatgcatttctgtgcactatgcacatacctagtccccaaggaggtcagacgacgttttcagatcctctggctctagaagtacagatggttgtgaaccaccttgtgagttctgtgaatcaaacccaagtactctggaagagcatgcagtcttcttaactactaagctctttcactaacccgtataatttttaaatatacaatggtaaagaatatcaaaattaactcttttaaaaatcacagtaattattgttagtaaccatattattggatcacactcattaacagctttggcaggcactctccatttgttgtgctaagaaatgttgtgagaagaaaagaatactgatatatatatatatgatgtattttatttttcaacagaggtacaaagaaaattccacacaggtaggcttcagcaaatggtacttcagtgtgggatgttcaaaagtagaagctgtcagagtctgtgactcacaccccacaccatgaatcaaaattaactcaaaacaaaccattaatccacacagtctgggatagtaaattcctagttgtgtcttcttaggcacattactaaaaatataatccatcaagaaaataaaatagatgactccagacacatttacaatgtaacaagacattgttttagagagtggggaaaatttttataaaaagccattaggaccatagtatttaagtcttcttaggttagtgataggaaactctctagacacccccccccaaaaaaaaaaatcacacaaaaaccttgaatagacatttactaaagaagataaaacttggtatctaaatgtgaaatttcagttcctgggtttgttatatgttgtccaggatgtgaacaactatagtcttattatatttgatgggaatggaatttcttacaaaatagaaatataatgaataaactggctttattgaagagaaaggaaaagttgagctgatacaaaagcctgtttactgtatacagtgatttcataattgccccaaatgatacttaagctaaatgttcttcagctggtaaataaagtgtgatacatctgtgggctgaagagtgctgagtaatacaatgtaatttcctgacatagagtgctgagggttagtcttatttgcattatggtaagtgataaaaatccagatacaagggctggagagatggctcagtggttaagagccctcactgctttatgaaggtcctgagacaaatgccagcaaccacatgggggctcacaagcatccataatgagatctgatgccctcttctggggtgtctgaagacagctacagtgtacttacatataattaattaataaacaaacaaacaaatcttttaaaaaaaaaaaaagacccaaacaatgcatattgtctgacttttcatacaaaattttggaaaattcatacaaaattctgtggaaaacacacaaaaaagcaacacaaaacaatttgtttgctgtgttagtggtaaagggcccaggggattggagagcatgtgaagtagtagagtttcttagtagttgtgattacatggtatgtgtgttggcaaagatctataggggtctaagaagaaaagaggagcagcttttgcgagtcatacttttatgaagcagagctagagttcataaaaagaaagttttaattaaattacggacaggctccgttgagagaaagaccccaagagacctacacagaacacatgtgtgcatgctttaagaaaatgacagttgtacccaccactggaaggacagaggccactatatcttatttttgtaggaactaaataataattccttctgaagggtccaaagttcaaggccagcttgggttgcacgaggttctgccttggcaaacacctttgggattctgattggttaattcatcctcctactttctcaagaatgaagtagatcatcccgctctcctccttgtcgtagcaggaaagactgggcgtttgatgcagttccacagtttgtccgtcaccagtgctcattaaggattcaatcgtgctcctttccctcagaatcgcatttctgaaactataaaggaaacaatgtgcttcaaaacaacctacaggagatgccagcaatttcattttactcagctccctactaaaaggtccccctttaatttagcgcaattggttcagcatgaattactgcaagtacaaaggagaaatgaatggagaagtcagtgaggtagctccttccatacaggaacctagagaaggctggacaaataaagcagactccagggaagaatggagagaaacagcctgcacagggctctgcaagaggattgggaagcagttgtcctagcgaattttatgtcaccttgatacaagctgtggtccagagagaactaggactgagaaaatgcctccaagagaactggaaactgggcattttctttcttaagtttcttgtcttttttaaagacaggatttccctggttagtcctgtcctgaaactagctctgtagaacaggctggcctcaaactcagagatctgctcccctcagatataggaggaccctgtccattgtgggtggtaccaaccctgggcatgtggtccctaacttccacgcatgccacacgcagcaaggtacagtaagcagcactcttctctgagtcagctcttgcctgcaggttatacccacctccctattttgagttcccaccttggcttctctctgtagactgtgactctcatgtgtaagccagacaccctttccttcccaagttgcttttggtcatgttaccctaagttacagcagcaggaaccctaggagaaaggagggaaaggaataaggggacgagtattaaatagaaactagagaatggcaatgttgaagactttggaagagcttctaattttcaaataaatataataattgaaagatagtgctgtttgtagctgatagcagtttattggaatatggagaagtaatactttgaaacagttttactgttgttaacttcttacttgctgtaaatgaaaactttgtagccgtgagagtttctttaagaacagagccctatcagtcatctacataacacttgcatataccgtttattgtttggttggaggcttggatattcaataactagaacaaagaacactgttacagtaagtgaaggtagaccttgggtctctcagcttgaagactctgtccagcagcatttgtatccctctgagtaactgcttttcccagtgttctgttagatgaagagaaaatggctttctttttggtttctttcttcttgttgctgtctgttaaacagccccagggttcctcctcctgtgccctcgggtctgctccccttccagcagtgtgctgctctgcacagctgggtggagcagtcccataaacatgatgaagaggaaggggaaagctcttttctctccttacattttgtttttttgttttttgtttttttttttctaattaaggttttattgttatttcttggggaaaaaaactagtgcatatgtagcataaaatatatataagaaactattactactcttctaactttgctcatttcctactgaagagcagaaatgaactttgagttgttacttttaaaagggcataggtatatttattctctccttccattttgtcttggttttagtttgttttttgcttttttaagacaggctttctctttgtagccctagcagtgttggaattcagtctatcgaccaggtggcctcaaacacaattaagccaggtgtagtgtcaagattaaaaatgtgtgacactacacctggcttaattggcttggtatgtacaattgcttggctctccatgttatgtaattgtaccacatacaggatgtagaacaattctatcacccctatagcttttgctctactgttaatgctgtgtctttataatgcattcttaatttttaaaaaagtttttgtccactcaaagttatgctttcaaatcctgtgcttttaaaaataacttctcccatgatatctgaattgcaggtgattttgcagttcttctaaaagcaggcatgaccgtaaagcaagcaattgtgtacaatctgctctctgccatgatggcttacataggaatgctcataggcacggcagtcggtcagtatgccaacaacatcacactctggatcttcgcaatcactgccggcatgttcctctatgtggccttggtggatatggtaagatgctttagatgacttctctgttgtactgaacttgcaaatagaatacagccttcaaaaatggaagacatatttggaagtggttggaaactgcagtgtatttttaaggaatatggccaattttaaagactgacatctaaataacaattagaaaaaccatttaccttagaatttcctggagcagctgaaaatttctaaccgattgtgtcacaagtcaactaatagtaggatttagagatacaattacagaataattagactcattgctttattgccaagaagaaagcagacctcctatgtgcattctagtctgtaaagttactaacagcagcagttggtcgtttccattttacaccagtacttcacatggtagacagtgtttctgtggggctgccagtttctgtaggtttcatttttacattttaagtagataatacttttacctttctccctggcaaaactttcaggtccaagaacagcatccctaagttcctacattgacttgccaggctttcaccatcttgtcgactctgtgctctgtcacttcctctctgtgtcacagatcacctttcttgaggggagaaactcctgcttcttgcagacccttcatgctttgcctcctcatttcttaggcagcacatctgcactcctcgggtgtggaacccactaattcctgctgagctttctgtccttggcacttgtgtcttgatctattgataacttaccaactgtttgactttatttctcaagtttagtgcttctcccacaaagagatggttctagtgggacagacattattgtcatcattattagttgtcatctgccactggaaatgcagttcacagccactaggatgctagcgatcagaagaaatattttacagtaagaatttgtggtttttttttttttttaaccaccatttttatttattccttgataattttatgcaatatattctgaactccttccctagctccaccaagacccttccccaacttaggtcaaggtctacattacatttgcaactgctaaaaaagctgactgaaaagagaattagggaacttgttttgttttgttttttaataataggaactctgggctttgttttaaagactgtggaagagtttatgtacacactgtcaggtacagtacgtaaactgtgaattatagaaaaccttgacagggctacagagtagaaagcatgaccacatctttattttagctacactgccttgactataagaaagattacttacccaaagccagtagaaggcattcaggtaggtattggcaatacacaggtattggctttacttcacgttcctaaaggagcctctgtggaaatgcctgtttggggaactttgggtagtgctatttagcaaccactatggaaataattctctttccttctttgtgtgtgtgtatgagtgtgagtgtgtgcatgtgtgtgttacagatagccataccaaacagaggtccttaggaataccagtcaggctgtatcctggagcccatctttgtaaacagtcatagtgctgtgtaccaggagcccctgatcagctctttgctgggttatgaccgttgaggtgacattcaggtaaaacttttaaatggcagagacccagcattgtttcagtcttgctgccaacaggaatccagagggcatgtttgtgaaacatgtatgttgtttatgcttcaatattacggggagtcagaaggaaaagtttttgttacagtaaaaacctagggaaaggaagaaaaagcagtgcaataataataataggcttactaggactggatatctgaagttgccagtctgtaagcctttcagattttaagtgtctttgttaaggtgtgtttctcctttcagcttccagaaatgctgcatggagatggtgaccatgaggagcatggcttctgtccagttgggcagttcattcttcagaatttaggactgctgtttggattcgccatcatgctggttattgccctctatgaagacaaaattgtgtttgacatccagttctgaccattcccagcatctctgttgattgcgagaatgctcgtgcagcttgcctctgttccttgtactgtatgcacgtcgctcagagaatccagtggcctgcactatttacaggttctgtagatttgagcctaaccacgaaagactggtgttcagtactgttttctctgcatgaatgggtcttttaaaagtttgcgataaagtcagaacatggaactccgtgtaccaatattgatagaagtttaagagaatcatataaaacactagtctttttattagtagaaacttctgttgctatgcagaaatagaaattaaaccaaaaaaatcatttaaactttaaaaatattttaaatggacattgagcagacatttttgcgtgtgtgctatgaatgattttagtgccctctattcagctaaatacatacatatgggattaatagggatcaacttgacacaactttgaaactgtataaagttgattttaggaactagagggaagcccaggctgcactagagtatggatttagcattggggaaagcccttattcttgaatctagagttactatttttgtatatatttgcatagtgttcaaacttgcagcctaaactactgaaatttgtgattgtatgtttgtgtgaacttcagtttaatgaaagattcataatggttctttgcatactatacttggtgttggatttttctttttaactttgtttttatggggggggtgagtcagaggatgtagtcagatacctttttcttaacattactgctctagaaaaatatcaaacaaatggcattccatttccctagtactaactaggttaattggaaattttaagttctgggtgttcatgttattttaccagtttggcatttggaactcggagcacatgctgtggctggtagtaaaagccaagtttgccatgcctatagtctgtatatagaatgtcagctaaatgcttactgcactggtaccatagctactttggtaccaagtatatgactaagccaaaatcacttctatcattttgtgccaagatacactgctggtgcctgaaatggagcggtcagtgtttgggtgcctgctcttacaccactggggcagtgatgtgtgagaagtctaagtcacgtttcgtctgattgtgactcataacttgtagactagtcatgtgcatacagctgtttacatcccatgccacccactcttcatttatacaggcaaatgtctgaaccgtgtgcagctagctctattttaactgcttggcagccaggatatcccttgggaaaaaccacataagagccaaaccctggcctttccattttaaatatttttattcagtcccttctctggttcttttcctcttactctgattttccttttaagacaaaaacaaaaatttgagggcaacacatgcgaccaggtgtcagaggtcaatctccaatatttctttgatatgttataagcaagggttatttggtcttacagcagttgtctctttctcagccctccttgcagtaagtggttttgcacacaagttttcagcactgggcatgcctacgacagtcattacttcacctcattgcttggccctttgagcaaccttgctaaaaggtgctggtgtgctcagtgctgtcaacttcaagtgactgggatattttgctttcaaaaccaagatacacttatccttcagttttgagtttgattttcaaggagggttgtgcattccagcattacatctccttcatttcaaacaactgcgggaatatactcccactctaaaatgcttcacaaagctgttatgcctacaatatacaaagttttatattctcaaacaaatggtattatctttatttgctagattttcttagtcatttcagggggctttaacagttgctgctagtattttgatagtgttccaccagtatttagtttttacatcattctagtgtatagtttcaggtctcattagacaatcctaattccactacatttctgtttgactccaacattccacttagcttgactagcctaattttaacatgcttgttggaggtcaccaatattacttgtatgatgctgtcaccatgtgacatccataaagattttggtgtataccacattgcattcaaccagctgtgattatgcttagaaatactatagtaactagatgcagtgtgaaccttttccattaacagtaagtcagtggcttcaatgtgattatggtcctgcaaggtgatacttgctaaaatatctaaacatttttgttgttgtgactgaatcatttttttttaaatttataaagctggaagtgatgaaatgctgttttttcattgtcaacagtggtgtgtcattttatatatgttcctaatgcttacggaactctcccaaaataaagttattcagaaagtgtgtggtgtgttttcattgtctgtctcataacactgaatcttcattggtactttaaagaggccagaataaagtcataattaagaacattaagtttatttaagccaaagcaaaatttaaacggtaaaatgtgttttattcagtctaacaagaagttgcaagagatgatgccaccttcagattatgagtttagttgacacagcagtgccacaccccgtccaatccagtgttccttgggttggtcagagggaagaatcatggcaatcacgaaatttgtagagtggccagtggtggagagtgtgcccctcctctcgcttgtcttatacagtggagcaacataacttggtcgtttggatatgtctgactttttgcatggctttagccacatctggaagaaagcacaaacacctctaagtcagagccattaaccatcatgtactttagctactgtgatagttccagagtaaggttatgtctaaaacctatgccctacatagattgtattttttgtcaacagtgaaatgattgttcgaatataaagatgcctaactatctcagaaccagtatacaaagagaaaacagtttgcctctgttagaagtatagtgcccactcgtgtatgctttcgatattatttggtttaattggactagccttggaaatgttaccatttttactctttttctacaaagaaagtattcttagtaaacttaattataacccatacttagtagtggtttcttaacaggttgtatgcaaaatgtttttacagtgaacagttactttatacaatactgcattgtgccataataaagactaattgcttaaaagcatattacccaactgttcatcacctcttccctgggggttatttctggtgcttttagtaacaacaaaattctatatatttaccaaagagagatgctactatttatactcagaatcatatgacttatttatttaaaaccaatacattctggcaacagttattttatttgaatcacctccccattgtggatggataatatgcatatgtgctgtgtttaacaactgtgaaccaggcaagggggttcaatagaggcacctagcaatttacctgctcctctacaagaactaaaccaagcctgaatagttgaatgactttgggaaaacacttgaattcagttatcaggatacaaaaacattgtagaatgcagacctgggacagcagcaagtcaagagaaacttcccacctgccacccagtttcatagctttgggaggggctcacttccagcaaatgtcctgtacatacactgtgaagttacccagtacttccaagtgtacagcctaagagataaggcctgcctgaattcagtccatataggttgacttcacccctccagcagatctctaaggtactatagtcagtagtcaccctaagaagaggcctgactgactggattgttctaagggtcagacaccttcacacagtctcatcttaaactttgcagcctttctctaccatcctggcttagcaagagatgtgctcaacaggctgagattactactacatggtgatgaacaggtgcaatgtagagggagccaaaggtgccctccacaagaacctgggtataaatgagcctgcctgtgataggatccctggtgtcacatgattcctcaaagcaagtataagaaatattccaccgcctccagcctatattgtgtctgccaacaccccccctccctggctgtaggcctgccccagaagcattgtcctggcaagtctcaacaaacaagtcagagctacaatggcagttcaaatgaaatggagagaataatgtacctacagcagccctcagtgtacatagccaagagtatagctaagaactgtcaaacacatatccctgctgtccttccggggagagccctgggagaggggttttgcctgaccttggccatgacctactgacactcaattattggtgctattgccatcacacattatatctattacatatatacataatagtatttcatattactgttgctagaacaatctggaagaaaagctccaggagccacagaaatacttcatcagtccccaggaatgcacaggcagggacctacctgtagtagtagatagctactgggtagacatacccaaagtagtagcaaaaaaataaactaccccactgcacctgtcctgggcccctgcatcagttgcctcacttacttggtcacacactgctcacaaggaaaggtgagtactacagggggtgggaggaattctgactcgtgttgctccctgtgaagcaactgtacttgtagagtgtcaaatcaagagtgcttagacccttcactgttgttgagcagccaagactagagcccattcaaaaagcagccagtatcaacagtacctgagaagccccaccactggatgaaaaccagtattcccattaccagaggagctatataggagcactctcctacctacttcattaatgcctaaactgttagtgtccctctcatgggttatccatagacagatgatctgtctctcttgaaagtatgtgctctgccaaaacttaataactacagtcaaaaaagctacaaggacattgtaacattgaactgcaatacacagtggaaagtgaattcagcaaagcatagtgaactaacaccctgatacacatctttaaaagaaagtcatattctaagaagtctatctcatataagagacaatccacctcactagatgcacagatttcaacatatacacaagaaacttcaaatagtttaaaataataatctcctaaaaaataactccctagtgacagattccaaagatactgaggttgatgaaatacctgatagattctaaagaatggttgtgggaaagcttagtgataagtctggggctaggggtggggtttaggaaaattggtatagtgttttcttagcatgcacaaagccctgggttcaattctcaataccacacaaagccaggcatggtggcaatagacctgtaacatttggacgatggaggtaggatgctcaggaattcaaggtcaccctcagcatggagttcaagttcagcttgagctgtatggaaccctgtatcatgcaaagaaaatctcaatgacaaatgagattcaagaagacacacagacacacacacacaaattaggaagacaatacagatatgaatgaggaactatcaaacacagaaagaaagattgctgtgagttcaaggccagcctgggctacatagtgagagtctctcttgaaagtcaaagaaaatgtaggtgcaagtctccaaatctcccggaggtcatgagttcaaatcccagcaaccacatggtggctcacaactatccgtaatgagaaacaaaaacaacaacaacaacaagaaaaactatgggccagagcgagcagagacccagagctagtgggagaaagggaagagagaaaaatggaaaaaaaaaaaagaaaaagaaaaaagagagatcatggcagaatgaaaagactaccgctctttgtagcactagtaaaatgtcaaatgtctgcataattgacatacttgaaggaaaaaaagactaaagacagagaaaaatcagttccatagaataagagcagatgtatttacagatgggaggtcttagattctgacattgcacattacacattacagtcaacatgcaaaagtacagtacaaagtaggtatggggcagggcatgtgttatgtattcatatatgcatgcccagaggtgtcaaaggatgtgagacatcttcctctctcatgttctaacctggcttttgaaacaaaatctgtcgtttgactttgaagctcagtgatggctgaccagcaagctctaggatctgtctgtctccatctcctaacatggttgcaggtgtgtgctgtgcctgtggctatgtgaacttgggttttcttgctatctatcacagcttacccatgaagccatctcatctcccagagatagttttaaaactttcaagagggaaagcaccaaatcacactgaagggcagccctggtggacacctacaagttctcagcagaaaccctacagaccaggacatgggataacatatttgagtttggaaagaaaatgattgctactcaagctacctatatccagcaaagctctcctgtagaattatcagaacacagtccaagggtggagtcctgtaagaagaattctgaggccttgtgaaaaaaaaactccaagtaaataagacaagaattgttatttgtttatatgcctctacaggtaaacatgtttttgccatgttgggcttgcccttgtgattgtaaactttactagtgtgactcttcttaaccctcagagtataaattgtctgatgctctgaataaagttgtctgttgcataagattttagtccacctcatttatcagctccattctcctcctggtcccactaccactagagcagtaaacaagaatgaagatcttccaaaaagatcttccaagataaataaaaactaaacaccatttataaccacaaaaccaaccttactaaagatgcttttaagagaactccatatccagaagtaaacaaacagaaactatcatcatgagcacattaagtataagttccacagaaagagtaggtacacagtgagaaagctaaaacaacaaagttatggatacaatcaaaccacagagataaatataaattaggcaacacgaattaatgctctaaacagaagaaaacagaaaacatgaaaggcataccataccttacataacttggaatgaccatgcccttaattcttcagttaattgatacaaaattttagatggattaaaaagcagacccaaagtacactgcccacaagaaactcagctcaaccacaaagacacacagactggaatgaaagagtggaacatgatatcccaaacaaatggaatccaaatccaagaatgagtagttacatataacaaagtagactttaagtctaagaaaataagaagagacaaagatcactgcataacaatcaaagaaacaattcatcaagaagatatattgtttataaatatttatgcatgtgatatcagttatcaattttataaaacaatgcttctagataaaaatggagaatgggctccaatataacaatagcaggggatgtcagtacctcatgcccaccaatgaatagtcatccaaaagatgcatctacacagaaagatcaaagttaatccacatggtaggtaaatggattctttacttacagtacattgcacccaaacactctagagatatgaaaggccacgcgatgtgcatctgtgtagtgctactactcagcttttttgctcccatcaaatttagtgcacagcaatcaattatgtcatcactttacctgtactggctagttttgtgtcaacttgacacagctggagttatcacagagaaaggagcttcagttgaggaaatgcctccatgagatccaactgtaaggcattttctcaattagtgatcaagggggaaaggccccttgtgggtgggatcatctctgggctggtcccacccacaagggttctataagagagcagactgagcaagccaggggaagcaagccagtaaagaacatccctcatggcctcttcaccagctcctgcttcctgacctgtctgagttccagtcctgacttcttttgctgatgaacagcaatgtggaagaataagctaaataaatcctttcctccccaacttgcttctcggtcatgatgtttgtgcaggaatgggaaccctgactaagacacttactcctgttccccctagcttttaattacaccttcgtctttgttctttcatttcctctttatgtttcttttctatttttaaagtccttgatgatttaatacactgtatactgagtttggtatttatgcccctccactcccctccagtgccccttctcatctctctgcactttcctctggtgaagcttttctttccaaccagcccctcctcctatatgttcatactttgcaacctactgagtttgtagttgattatatgagcatgagtaggaaatcactgagaaaggggcaacttatcagtggctacaccactgaaaagaaagactctccctgagccatttattgctgtctcaagtacctgagctcaagtgatcaggaattctaacttaaaatttttcttcacttttgtatattgttagggagtgctttcttctctcttcttttcatgtgtgttatatatttgtccaataattattcacatatgtgtgggtacacatgtatgtacagggacatatgtgtctctgtgtgtgtttatgcctgagattaatgtctagaatctcaattacaacttcagtttattttctgagatgggatctgccagtcaaacacagagtttactgatatactgctgttaattcttcatggaactagaaacatcctattcccttgggagcccagatgacccagaatagccaatgaaacctgaagcaaaaggagcaagtctgcagtctcccaattcacatttgggaggaatgctccaaaagcacgctaaggaaagcatcatggtgtttacatacagatggcacagcccatgaaaacagaatggaaaacccaaagaggtacccattcctgtgctgccaactaacctgaccaaagtatcaaactgtatctcaaagaaagacagcttcttcagaaagaccattttttatattattattgtattattttttattagatatttttctttatatacatttcaaatttcaaatgctgtcccgaaagttccccataccctccccccacccactccccaacccacccactcccatttcttgaccctggcattcccctgtactgaggcatataaagtttgcaagaccaatgggcctctcttcccagtgatggccgactaggccatcttctgacacatatgcagctagagacacgagctccgggaggtactggttagttcatactgatgttccacctatagggttgcagatccctttagctccttgggtactttctctaactcctccattgggggccctgtgatccatccaatagctgactgtgagcatccacttctgtgtttgctaggccccggcatagcctcacaagagtcagctatatcatggtcctttcaggaaaatcttgctggcgtacgcaatggtgtcagcgtttggaggctgattatgggatggatccccgggtatggcagtctctagatggtccatcctttcgtctcaggtccaaactttgtcttggtaactccttccatgggtgttttgttcctaactctaagaaggggcaaagtgtccacactttggtcttcgttcttcttgagtttcatgtgttttgcaaattgtatcttatatcttgggtattctaagtagaaagagcattttcttaacataagttagtgcagtctctataaaatagtagaggtttcacaaaagaagtaaaataggctgattatgggataccatacccggggatccatctcataatcagcctccaaacgctgacaccattgtgaacgccagcaagattttgctgaaaggaccctgatatagctgattcttgtgaggctatgccggggaaagggaaccagagcagaagagaagcagatggacatgtcaaagcacaacgtatagatgtatggacatatcatagtgaatcctattttctgcatgatgtgtgctattgattacaattttcccccagccaagttattaaagcagtgtgtaacacataattttctaacttacataaaaatataacatagttccattcttcttttagttacaatacaccacatttttttagtcatttaagcaagtttctagaatattacccatataatttattgtagaatatggccagtctttagaacaagatttaaaagccagctggcctttgacttatgaaggcaaagagcaaactaaaaccataagcatcttttagggtttgaccaaattaatttatctcatagtaatgagtagtcctttggggttcttaggtcaaacacaaccacatgaaggagccagtgactaagacccaggggtatccattcctcccaggtcactgtaggacccttgttgtgggggatggacaagctgtagcttaacagcaatataactctcaaaaacactttcaacttaaacttaaatgaacaatgcacttcactttaagcaaagaatggatttcactcattagaatttctattcctcactgacttctttgttgaagaagaattatccctttgtagatgtactcccgccttctgttccctgcaagctaattgaggatgtcctcagaaaggaaaggaattgtaacccagccagctcctgaaatggcaaatgtttgtttcacttttggggtctcctatcctaagccttctctgcccagagcatcatggtatgtagaaaagaggatctttctaggtttggactagcccctccctttatggctgctatgatgagttttcacctgtctttaagcttctcacagaattctataatccatgtgactctaatagtctttgttttatcttaccatcctggatgtgcccttcggattatataaaaatatattttgtcatgatgtagttacacacagaaacaattatatggcattgctcctcaccattcattaattcttcatttcatgaaacatcaaaattaattcctcattctataatcaaccctggcactgtgtttacagttattaactaacatggaatttgagttgtctttatcccacaaccacatgtctatagctggaccatgggaaatcctacttccgtattttcagctcttttaactataaacaactgtacttttcatggtctattttgtgctcagttgttaacattccttgctttgttggcattccattgtttaaaataacttacaggccagaggctgcagcacaggccagtgttgctatgtgcaagaaggctgagggatgagcttaatccagcgagagtcacagtgctactgactgtgagataatgtatactaaataagttttctttaaacagaaacagtacatcggtatgtaacaatcaactaacagaaatgcagataccatagaaactaaattcataagctcattaagagcaaataaatccagtagtgcagcattgggaacagctttatagagcaaagttaccatgaacaacaagaacagattgaatgtgcatatatccatatccgtgcacacgtgcatgtaacccttagtaaatactaaccacggggactgtgtcatacagaactttaggatgtgattctgcaagtttcttggtcttcctgtcccaggaagctccatccaaaaacaatccatgaatgtaaacacctaaataacaaagaaagaagttagcattcaaaaatgataggtgactgagcccagcatctgagattcctgtctggggagagcaggctgacatagtgccagccatagcttctcaggttctcttcctctctacctccccttccacaatccatacagtaaattactgagtcctcctagatgtaactagcaattcagataataagaactgtgggtaatacccttggaatcaccgacactaaacagtaaataaactgccagtggcttcctcaattccctgtgacatttagttatcaatttacttatttatctgtggagacaaggtttcaagggagtctcacaggctgtaagcgttcaatacccctgtctcagattcctaagtgctagtgtttcatgtctttcaacacactggacaccacttagctcttagaaaacagggcaagcctgacttgtaaggccagagaactggaagcagacacacattaaagtatacaaaaagagaaaggtggaggttgtggggaaactcagatggtgtctgtgagccctctctccaagggtcccattgagaaaggaatttctttaggaaaatcctaactttctcatttttgttcaagtaattgatgaagtaagatgaaataagcatttttttcctggcaaaaaaatgtacaagtatgtttgtgtgcatataaaataaaattaataatttaacaaacatctgtcctcaatgatactactccgggtggacacactgaaatttagtaaagtggtttgcttagctgaaggccactcagctaagctcattactgagcaattttgatataccaagtcatctatactaatcattcgataaatcctgtttcatgtgctactcaaccactctcaaaataatgctggagttttagtgcctgaaaacctgcttcctgaggtaacacatagatgcagactggtaaaaaggaaaacaaagaagtctgtctaatctctatgctcgatgcatacaattccacaggttgagtatgggcaatttaactactttaaaaactttatgcaatgctttcataacttaaacattttagctgggtctaaaaattgtatagggtcatcacttccactgggatgtcaatgggaatgctgatttttttttcctatgtcagaaggacactgagcaaagttaggagggataaagtcctgaatatggaagtaaccatagtttcatcaagacacttttcatgagaatgcattgttttcaaactccttcatgaagtcttgagcatggtaggctgggaaggaaacagttgtgcatgtggccagagggcctgctcctaatgctactgtgagcccttgggggaggtgtttagcctccctgagcccaagtgtctgcctatgtaataaagactgtggtgcctgttactatgaggattagacataaagggctgggcagtttctgtggcacagatgtgcaagagaacactaccaca

SEQ ID NO: 1097 - DNA, 5748 bp, Mus musculus
gaaaagtagaaatgaaggtgcatatacacacaaagttttgcctcatctgtttactgacatttattttccatcattgcaaccactgccatgaagaccatgaccatggccctgaggagcttcacagacatcatcgtgggatgacagagtcagagtcaagcaaattttcagtgcaggatgctgaaaatgaaaaaaagtactatattgaaaaactttttgaccgttatggtgaaaatggaagattatcattttttggtctggagaaacttttaacaaacttgggccttggagagatcaaagtcgttgagattaatcacgaggaccttggccatgatcatgtttctcacttagacattctggcagtgcaagagggaaagcatttccattcgcatacccaccagcattttcacaatcatttaaatgcagaaaatcatactacaaccagtgtgacatcaaaaagaaaccacaaatgtgatccagagaaagaggcagctgaactgcccatcaaagctgatgataaacacctgcatgaccgcaatcaccgcttccatcatcgccatcgtttgcatcatcacctggatcacaacactactcgtcacgttcataatgactccgttgctcacagtgagcatggggagcccggtcacagcccttcaccagagaccaataaaacacaagagcagtctgaagtgaagtcagtgaaggtcaggaggaaagaaaaagggaagaggaagaaagaaaactcggaggttaatacaccaggtttcctccccaaccatgatcacagtgaacaatatgagcataaccgggttcacaaacttgaccgtgtacatagccctggccatcctcatgcgcatcttcctgagcacagtggtcatgagcttggccatggacaccaagaacttgatcctgataatgaaggtgaacttcgacatactagaaagcgagaagcaccacatgttagaaaaagtgcaatttattccacccctagccacaaagaccagagtgaagacgaccgccagcatgaatgtttgaacgtcactcagttgttaaaacactttggtcttggtccgaactctcccatctcaccggatctattcacgtacctttgccctgcattgctgtatcagatcgacagcagactttgtattgaacattttgacaaacttttagttgaagatttaaataaggataaaactctggttcctgaagataagacaaatataggggcatcggcgtggatctgtggcatcatatctatcaccgtcattagtctgctttccttgctgggtgtgattttggttcccatcatcaaccaaggatgcttcaaattccttctcacgttccttgttgcactagcagtaggaacaatgagtggagacgcccttctgcatctactgccccattctcagggtggacatgaccacagtcatcagcatacgcacggacatggtcattcacatgggcatgaatctaaggagtttttggaagaatatgatgctgtgttgaaaggacttgtggcgctaggaggcatttacttactgttcatcatagaacactgcattcgaatgtttaagcactacaagcaacaaagaggaaaacagaaatggtttatgaagcagagcacagaagaatccactattggaagaaagctttcagatcataagttaaacagcacaccggatgctgactggctccaactcaagccccttgctggaacggatgactcggtagtctctgaagaccggcttaatgagactgaactgacggatttagaagcccaacaagaatcccctcctaaaaattacctgggtgtggaggaagagaaaatcatggaccattctcacagtgatggactgcacaccattcatgagcacgaggtccacgtgacctcacataaccaccatgatgaggataaagcagtgctgaggaagcacagccaccagtggcaccacagacacgcccatcattctcacgggccctgccactccggctcagacctgaaggaaacaggaatagccaatatagcctggatggtgatcatgggtgacggcatccacaacttcagtgacggcctcgccattggggcagctttcagcgcggggctgactggaggcatcagcacatccatagccgtcttctgtcatgaactgccacatgaattaggtgattttgcagttcttctaaaagcaggcatgaccgtaaagcaagcaattgtgtacaatctgctctctgccatgatggcttacataggaatgctcataggcacggcagtcggtcagtatgccaacaacatcacactctggatcttcgcaatcactgccggcatgttcctctatgtggccttggtggatatgcttccagaaatgctgcatggagatggtgaccatgaggagcatggcttctgtccagttgggcagttcattcttcagaatttaggactgctgtttggattcgccatcatgctggttattgccctctatgaagacaaaattgtgtttgacatccagttctgaccattcccagcatctctgttgattgcgagaatgctcgtgcagcttgcctctgttccttgtactgtatgcacgtcgctcagagaatccagtggcctgcactatttacaggttctgtagatttgagcctaaccacgaaagactggtgttcagtactgttttctctgcatgaatgggtcttttaaaagtttgcgataaagtcagaacatggaactccgtgtaccaatattgatagaagtttaagagaatcatataaaacactagtctttttattagtagaaacttctgttgctatgcagaaatagaaattaaaccaaaaaaatcatttaaactttaaaaatattttaaatggacattgagcagacatttttgcgtgtgtgctatgaatgattttagtgccctctattcagctaaatacatacatatgggattaatagggatcaacttgacacaactttgaaactgtataaagttgattttaggaactagagggaagcccaggctgcactagagtatggatttagcattggggaaagcccttattcttgaatctagagttactatttttgtatatatttgcatagtgttcaaacttgcagcctaaactactgaaatttgtgattgtatgtttgtgtgaacttcagtttaatgaaagattcataatggttctttgcatactatacttggtgttggatttttctttttaactttgtttttatggggggggtgagtcagaggatgtagtcagatacctttttcttaacattactgctctagaaaaatatcaaacaaatggcattccatttccctagtactaactaggttaattggaaattttaagttctgggtgttcatgttattttaccagtttggcatttggaactcggagcacatgctgtggctggtagtaaaagccaagtttgccatgcctatagtctgtatatagaatgtcagctaaatgcttactgcactggtaccatagctactttggtaccaagtatatgactaagccaaaatcacttctatcattttgtgccaagatacactgctggtgcctgaaatggagcggtcagtgtttgggtgcctgctcttacaccactggggcagtgatgtgtgagaagtctaagtcacgtttcgtctgattgtgactcataacttgtagactagtcatgtgcatacagctgtttacatcccatgccacccactcttcatttatacaggcaaatgtctgaaccgtgtgcagctagctctattttaactgcttggcagccaggatatcccttgggaaaaaccacataagagccaaaccctggcctttccattttaaatatttttattcagtcccttctctggttcttttcctcttactctgattttccttttaagacaaaaacaaaaatttgagggcaacacatgcgaccaggtgtcagaggtcaatctccaatatttctttgatatgttataagcaagggttatttggtcttacagcagttgtctctttctcagccctccttgcagtaagtggttttgcacacaagttttcagcactgggcatgcctacgacagtcattacttcacctcattgcttggccctttgagcaaccttgctaaaaggtgctggtgtgctcagtgctgtcaacttcaagtgactgggatattttgctttcaaaaccaagatacacttatccttcagttttgagtttgattttcaaggagggttgtgcattccagcattacatctccttcatttcaaacaactgcgggaatatactcccactctaaaatgcttcacaaagctgttatgcctacaatatacaaagttttatattctcaaacaaatggtattatctttatttgctagattttcttagtcatttcagggggctttaacagttgctgctagtattttgatagtgttccaccagtatttagtttttacatcattctagtgtatagtttcaggtctcattagacaatcctaattccactacatttctgtttgactccaacattccacttagcttgactagcctaattttaacatgcttgttggaggtcaccaatattacttgtatgatgctgtcaccatgtgacatccataaagattttggtgtataccacattgcattcaaccagctgtgattatgcttagaaatactatagtaactagatgcagtgtgaaccttttccattaacagtaagtcagtggcttcaatgtgattatggtcctgcaaggtgatacttgctaaaatatctaaacatttttgttgttgtgactgaatcatttttttttaaatttataaagctggaagtgatgaaatgctgttttttcattgtcaacagtggtgtgtcattttatatatgttcctaatgcttacggaactctcccaaaataaagttattcagaaagtgtgtggtgtgttttcattgtctgtctcataacactgaatcttcattggtactttaaagaggccagaataaagtcataattaagaacattaagtttatttaagccaaagcaaaatttaaacggtaaaatgtgttttattcagtctaacaagaagttgcaagagatgatgccaccttcagattatgagtttagttgacacagcagtgccacaccccgtccaatccagtgttccttgggttggtcagagggaagaatcatggcaatcacgaaatttgtagagtggccagtggtggagagtgtgcccctcctctcgcttgtcttatacagtggagcaacataacttggtcgtttggatatgtctgactttttgcatggctttagccacatctggaagaaagcacaaacacctctaagtcagagccattaaccatcatgtactttagctactgtgatagttccagagtaaggttatgtctaaaacctatgccctacatagattgtattttttgtcaacagtgaaatgattgttcgaatataaagatgcctaactatctcagaaccagtatacaaagagaaaacagtttgcctctgttagaagtatagtgcccactcgtgtatgctttcgatattatttggtttaattggactagccttggaaatgttaccatttttactctttttctacaaagaaagtattcttagtaaacttaattataacccatacttagtagtggtttcttaacaggttgtatgcaaaatgtttttacagtgaacagttactttatacaatactgcattgtgccataataaagactaattgcttaaaag

SEQ ID NO: 1098 - protein, 836 aa, Mus musculus
KVEMKVHIHTKFCLICLLTFIFHHCNHCHEDHDHGPEELHRHHRGMTESESSKFSVQDAENEKKYYIEKLFDRYGENGRLSFFGLEKLLTNLGLGEIKVVEINHEDLGHDHVSHLDILAVQEGKHFHSHTHQHFHNHLNAENHTTTSVTSKRNHKCDPEKEAAELPIKADDKHLHDRNHRFHHRHRLHHHLDHNTTRHVHNDSVAHSEHGEPGHSPSPETNKTQEQSEVKSVKVRRKEKGKRKKENSEVNTPGFLPNHDHSEQYEHNRVHKLDRVHSPGHPHAHLPEHSGHELGHGHQELDPDNEGELRHTRKREAPHVRKSAIYSTPSHKDQSEDDRQHECLNVTQLLKHFGLGPNSPISPDLFTYLCPALLYQIDSRLCIEHFDKLLVEDLNKDKTLVPEDKTNIGASAWICGIISITVISLLSLLGVILVPIINQGCFKFLLTFLVALAVGTMSGDALLHLLPHSQGGHDHSHQHTHGHGHSHGHESKEFLEEYDAVLKGLVALGGIYLLFIIEHCIRMFKHYKQQRGKQKWFMKQSTEESTIGRKLSDHKLNSTPDADWLQLKPLAGTDDSVVSEDRLNETELTDLEAQQESPPKNYLGVEEEKIMDHSHSDGLHTIHEHEVHVTSHNHHDEDKAVLRKHSHQWHHRHAHHSHGPCHSGSDLKETGIANIAWMVIMGDGIHNFSDGLAIGAAFSAGLTGGISTSIAVFCHELPHELGDFAVLLKAGMTVKQAIVYNLLSAMMAYIGMLIGTAVGQYANNITLWIFAITAGMFLYVALVDMLPEMLHGDGDHEEHGFCPVGQFILQNLGLLFGFAIMLVIALYEDKIVFDIQF

SEQ ID NO: 1099 - DNA, 100944 bp, Homo sapiens
gataagcagcagcattaaattctcatgggagcacgaaccctatggtgaaccgtgcctgtgagggatctaggttgcacactgcttatgagaatctaatgcctgatcatctcaggtggagcagtttcatcctgaagccatccccctgccatctgtggaaaaagtgtcttctaggagactggtccctggcgccaaaaaggttgggggactgctgccttagcttgtggctccctttattcagcaacattttatctctctgagtgtcatttctctttatcttcctctgactctcctcttcttccctcttccatttttagagtctcttatgattaaatcgggcccatttggataattgaaactaatttgttcatttcgaggtcagttggttagcaactttaattccatctccagcctttgtaccctttgccatgtaatctacatgttcataggatccagggattagcatgtggatgtctttatgggggaggcattattctgtctaccaccctagtcgtatgataatatgatttcccttcttgcccatgatcacgtcacttgcccaccgaaaattcttcaatggcccttgttgccctcagggtagcattcagactcattcaggctccttaatgtgatacacaaaggccttccttaccagtcctgtctcatctctcccaactccccatgcccaaaacacacaacaagattgtgtgtttcacttccccaaactgaaaaccaggcattcactcatctcattcatctgcttgtttgctcttttcccagccttttatctgactctactactcatccataagtcagacttcagatgtgacttcctttgggaagcctgagtgtatccccaaattttggcctttgctaccgttgcaagctatacctatatctaacatagcacttgccatgcgatactgtaattatctctttaattaccatccaccaccaccaccaccaccaccaccacgagactacaggcaacttaagggtcagcctctcatttgttcacccttgtatcagttacttatcagagtggcttgcacacaataaaaacacaaactttctattttttaaagcaaccctattaactgagaagcacaaacttttgcttaaagatatatcccttaatatttatgtgtctctttttccaagacagacttatagaggatgtagagtcatataaatctaaggactgaaaagtaaatgtacctttaatcctccaaatggatttcatttaattaatgaattaatttactgaggcaaggtcccactctgtcacccaggctagaatgcagtgacaaaatcatggctcactgcagcctccacctcctgggctccagtgatcctcttgcttcaccctcccgagtagctgggaccacaggtgtgtgacaccatgcccatctaatttttaaaacaatttttttgtacagaagaggtctcgctatgttgtccagactggtcttgaactcctgggctcaagcgatcctcccatcttggcctccgcctatgctggaattataggtgagctactgaactcggcccttatctggcttcttatatcaagactgtgcacaggtcactatttttgcaagaatttctataccacttcctctgaaaatgttggtaatttaaaaaagaaacagccagacatggtggctcacacctgtaattccaacactttgggagatggaggtcggccaattgcttgagcccaggagttcaagaccagtctgggcaacatgatgaaactgtgtctctacaaaaaattcaaaaattagccaggcatggtggtgcatgcctgtggtcccagctactcaggaggctgaggtgggaggatcacttgagtttgggaggtcgaggctgcagtgagccaagagatagtgacactgtatactccagcctgggcaacagagctagaccctatctcaaaaaaacaaaaataaaaataggttggataatgtaagagttaagaacagagactctagagccagcctgggatcctggctctgccatattttatgtaaccatctcagttttcttcatttgtgaaatagacacagtaatatccacctcagagggttactgtagaattaaatgagttccatttagagcatttaaatggtgcctggcacattttaaataataccgcttcatgtggttagggtgggaaggaagattgtaaaacataaatgcttagagaaagcaactgtcgttgtaattaaaatgaaacttgggtgtgatgaaatcattggaggctgtaggtgagatcatctatgagaaagaaaaagccaagcatgatgggtcgctaaccaccgggcactgccagaagcatttctcatgaaacattaggaagtttccaaatcttctctaaagacgtgtgcttgaaaaaacaaaacaaaaaaagaatgacaacaacaacaaaaagatatgtgctggaaagaagagatgggattctatgaagaatgtgaaagtggcttattgtatgaaatacaaaatataatccaagctttacctagaaatagtacaagaaaaattcagaaatccctgcaagctattcttgttttgacaattcatttctcgccttccctaatatttagaattttgctgcattgttgccatcaaatattttttaagaaataaaggtaagcagtatttgctaagacagaacacgtgtgtcttgattttagaagatgtacttgattattttcataaatgtcaggtgtgaaatgggtcaccttattaattaaagccttaggcaaaatttgaaatttgatcttatgtgatgacattttaaaatggatgtattaatttcaaccagtttaacaaatgagcctttttaaaaaaatttacgtggtaacttattgttaattcatttccatgttgacagttttccttaaattgaagtgtaatcacccacaaatacttttgaagtttgccatattcatgtggatatttatgccacttttttctaattcctttggactaggagttatgttctgaaaagtcaatttctgctgtgccagtagagttgcaaacgacctaaaatggctacctaccacacctgtttttcttcatcttactactctgtgagtgaatgagcttgcctggaagcaagattgagaagttagcaatttgtctacagtttttcttctttccctttgtaccacactaccctcaagaatctagacaaccgtgttttctcttttcttagaacttcctctttagaaaaaacctaaggaaaatatattctcacggaggtataaataggtaatacaactgtagcaatttccctccaagttcttccggtttcaaggcccagggatgaaatgctaactgtgtaattgtaggaattggcaagtacactaaaaatacaaaaaattagccgggcatggtggtgggcacctgtagtcccagctactcaggcggctgaggtgggaaaatggcatgaacccgggaggcggagcttgcagtgagccgagatcccaccactgcactccagcctgggcgacagagatggactcctcctccaaaaaaaaaaaaaaaagaaaagaaaaaaaattggtttagggtgagaagtcttcatggcactatgacgtgggcaaatgtgtggtcaacgtgttagtctggctctggctctgagttttttgcttttgttcattcttctgagtaggtctttctctttctcttgagcctggtctcatctgtattttcgaaaggacttgccatggtcaatcagaggctttaagcttctctgttattgtctgtcttccaggagagatgcctaatgctaacaccttttatttgtattgccatggcaatacaaacccttaaactaagggttctggttattcttaggttaggatcatgtaggcagatcataaaaaagttaatttttctcccctgggtgagaagttgcttaaatttttgtgtcaattgtttcatttctccaatctatttttgtctctgcaaatagcctgaaactcggttttattgcacaagcctaccaattcagaatgatctcaggcgcatcagacaagtttgtccctcaccagagttgtattggtttatttctccctgccttcgtgtgcccatctcaaaatggtggggtctgtggaagaggatggccttcccagatatgcaatttttgctctttagaaaggagtttaaaaaaaaaaaatcccagctactgtgtggggaaggcgaaggaggtgggaggtggaaggattttgcttgagcctgggaggttgagtctgcagtgagctgtgattgcaccactgcactccagcctgggagacagaatgagaccccgtctcaaaaaaaatgtttttttttttttatttagaaaggagtataaggggagctgtgctcctctagtgagaactcccatggacttctaaaggcccatttatcctaccttagtctttagagcttgccaaaaatgagatggtagagccataatttctcagggatcagaaaaagactaccgcgtgggtccaacttccccattctgacagtgtgtttgccgtgttagatgttacacagtgccacaggtctcgaataatggaaataatttgtatcctttaaatatctctggcatcagttttagagctggagcttcaatccccaggctgaaatagtctctaaaaatgaatagtagctattaagtttgaggcctcagtttggaattttacctacatattgctgacatcttcctttcccaaatctctttttttttgagacagagtcttgccatgtcacccaggctggaaagcaggggcatgatctcggctcactgcaacctccacctcccaggatcaagcgattctcctgcttcagcctcccaagtagctaggattgcaggcgcttgccatcacatccagctaatttttgtatttttagtagagatgggttttcatcatgttggccaggctggtcttgaactcctgacctcaagtgatccacccgctttggcctcccaaagtgctgggattacaggtgtgagccactgcccatggcccccttttccaaatcttaacacctgttctggtacttaatatccccacaccccaccacattggtacagcaatataatttagtcttccttgtactcctaatgacttcatcaatgaaaagagtcaaattctgtaacttatttgaagatatttttttctgagccaaacatgagtgaccaatggcctgtcacacaaccccaggaaatccttagaatgtgtgcccaaggtggtagttaagcaacagcttggttttatacattttagggagatataagacacaatacatgtacgatgtacattggtttggtccagaaaagtgggacaactggaagcaggggctggttgccaggtcttaggtggattcgaagattttctgattggcagttggttgaaatagtttatctaaagacctggaatcaatatgagggagtgtctgggttaagataaggggctatgtagaacttggggataagtagtcagaaaagaaataaaatttagcctaggcgtggtggctaacacttgtaataccagcactttgggacgccgaggcgggtgaatcacttgaggtcaggagtttgaaaacagcctggccaacatgggagaaaacccgtctctcccccaaaatacaaaaactagctgggcgtggtggtaggtgcctgtaatcccagctactcgggaggctgaggcaggagaatcgcctgagcctgggaggcagaggttgcagtgagccgagatctcgccactgcactccagcctgggcaacagagtgagactcatcttaaaaaaaaaaaaaaaaagaaagaaaattttaaaaaaaagtataaggggttatggagaccaaggttcttattatgccgatgaagcctccacctagcaggcttcagagagaataaattgtaagtgtttcttacagactttaaaagacgccagactcagttaattctctcctggatcagggaagagacttggaaagggaaggggattctctacagcaggggtcccccagccactagactggttcaggtgcatgggctgttaggaacggggccacacagcaggaggtgagtgtcaggcagtgagcattactgcctgagttccacctcctgttagatcaatggtggcattagattctcataggagcacaaaccctattgtgaactgtgtatgtgagggatctaggttgtgcagtccttatgagaatctaactaatgcctgataatctgaggtggaacagtttcatcccaaaaccatccccacccacccccatctgtggaaaaattgtcttccaggaaaccagtctctggtgccaaaaaaagttggggactgctgctctatagaatgtagatgtttcccacaagagacagttttgcaaggccatttcaaaacatgtcaaagaaatatattttggagaaaaatacttagaattctttcagagcctgctatctgtcatgttggtatcattgctacaaaaagtctctttcatcagtcttaaggtctgttttaatgttaatactggtcatctgtgcctgaattttttttttttttttgagacagagtcttcttctgtcacccaggctggagtgcaatggcacaatctcaactcactgcaacctctgcctcctgggttcaagcgagtctccctgccttagcctcccgagtagctgggattacaggtgcccgccaccatgcctggctaatttttgttatttttagtagagatgggattttgccatgttggccagctggtctcgaactcctgacctcaggtgatccacccgccttggcctccataagtgctgggattacaagcgtgagccaccacactcggcctgtgcctgaattttaaagtgaggagaatataatgaggcatgtttaaccatccattcccatcatgcctggtactagtgtttcaggttaactttggaatgcccttggcaaagaagaagtgaccattcagttagttgggaggcttaaaattttatttttggttcacagcctctctaggcatagctttgtctaaagtaaacttttaggccatgtaaaagtaacagtttaaactggagatgaatttaggaaggggtctttatcattggttattactaatcttgaatcacggaaagaacaagtgagtttgaaaggcctgatttcttagaattagtcgtgttcttttttttgtttgttttgtttttttgagacggagttttgctcttgttgcccaggctggagtgcaatggcatgatctcggctcaccgcaacctccacctcccaggttcaagcgattctcctgcctcagccttcccaagtagctgggataataggcatgtgccaccaagcctggctaattttgtatttttagtagagatggggtttctccgtgtgggacaggctggtctcaaactccggacctcaggtgatccgcccacctcagcctcccgaagtgctgggattacaggcgtgagccaccacgcctggcagaattagtcatgttctttatagatttcattaaagactcttaattttgttgtgtatgatgactattttctcctctgtaagagggaaacccaggtttatgacatggacttccttcagccactgctaaagattggggtatgaagtaggtttcttatttcctcttttgtattaatagttggttcttttcaaatcctctgaggggcaaaaagacccttggatttactatatcatgtctcacaaaggtagactggtcacatttgaaattttagatatgtgaactaatattgtggctgaagcagcatgaataagctaaacaatgaaaggtaaaccatttacacataattcagtacctctctttcccccaggtactgaaaatcatttatactatttttatagttgagatgagcttctttatgaatcaagtgaggtggctggaaaaagaaaatgtcttacactttcagaaagttttatgattataacatattagaaagtctttaccctaacatatttcttatatataaaactggtaaagataaaatgaaattcatatattgttgctgtagtgtccattatttgactcagcaggtgattttgtgtaagcctgcaagtcattttctgagattccttttctcagtaggaaaagtaatatgctagtatgcagatgaatcatttattctatctgataattttgcttgaaaatctgcccaaatcagtgtgtatacacttgaaagtaaataaatgtttgggtgagtttaaaaagtgttaggagacacagtctctattttcaagttgcttaccacatagttttctatagggatgacatttaaaatatgtaacaattagtaaagaataggcaccaaccaagtagaatgggagtgactaataagagctgggtccaaagggctctatcttagccaggtattaacccactagttcctaaaatgtggaggtctggggaatcttgagaggaaggactggcacaggggtgagaagcatggggggataccactcagagttgcagctgttaaccaacttgcattgaagtatttcagtatttgattagttggttcagccgtacttgtgtgtaccagctgaacattagccttgtatatccataactaaaaaagcagtgtaggtgccctaaaatgtaaggactgcaagcgctatatcttattgatatttgaaagaaaggttatgtatgttttaagggtgttgataataatgtgttcaataaaataattatgagccataaaatatcaagctaatttggaagcttcttatgctttgcacacaaaggatgtactatcatgattttatgaactctaaggactttagttctaggatgaaccttagaatatatttaaaacgatccccttaatttatcaatgaatctgaggaccacagctattgtctcacatttagtggcaatggtgagacttgaaactaggactcaggcttaatctcttttctccacacctcaggacttctccctttgtaagcaggagtgaggtccatgctctggctttccaaacaaggaaaagggcatatgagtagttcagtgttctgaactacgtatggcaatcagtaggcatttatcaagcaccattttcgttgttttggatgttttttgtagagatacaaaacaaaaaataaccttctttcatgaaggtataatatgcaggttagcgggactacctagccgtccatactgaatgggtttggaaatcccaactcttttctctacctgctctgtgataccaggcaagttaaagtcttgtgtgcctcagtttcctacctcaccgtgttatggtgattaaattaatatatatgtggagtacttgacacacagtcaagcctgcgattactgctgttcatggttttattttctctactagacaccagtaaggcacccccagaactcgctgtgttaagcagattctggttggatatagaaacacaggcaccccaggcggaatgcagatacgcctcaacatgtggattaagtaagagccaggaagcagagtaatgaagcaaaaataagatgtccagagtcaccttttaagaaaatgtgggttggtggttgcttaagaggggaggagacaatttagatgggatgtatggcgtgagcaaagggcaagaatgagcacggtgtaggcacaagtccatggaactgcttggctggatcgggatttttttgtcatagagtgttaagaaatagtcgatcagttgaggagtagaggagtgaagaccttggaaagttgccaaaagcctcgagaatttctctacatgtgtgacatgttctcaggactcaactttttcttttaggtttggaagacccgcagtaagtgtgctttagaattaaatgggtgggaaggggagctaggcaaaacacctcgcacttagcactaaataaagttcgctgttgccctaagagactgaaaaggttactttaacaaagggggcggggttaacttaacgtagatgtttaactcgtatacagatgaacattccagttgatcactctgaagctttttggctaaagcgtttgggtttagagcttccattactcatccgccttgcccaaggcctcagcaaccgacgttcgaaagccaggagaaaaggcgaatgataaagggcgctccacgcatgcgttaagaagccgccccaactcccccgcggcgttctttcttggaacaaaactagcgcggagccacggaactccgcagtttgcgtagacttgaatttcctattcctcggacgatccatgtggaatccgtgagtagtgcgactcctttacgcaactggcgttatccgaagtgaatagctaggtggcgcgtgtacgcccatagcgtagcacccataggcggacggggtgcggctgcgcagggagctgagtggaccttgtacgccgcaagcgtagcagggtgtcagacgcgccggtttctgcgacgcagttagcgcagtctgctttggtgaatacacgatttggtgcagccggggtttggtaccgagcggagaggagatgcacacggcactcgagtgtgaggtaactataaaaccccgatttgtttacattccctcccccagaaccggccccgtgcgcggcggagactgcgagtcccgggacggcgtgggggtagaaagggagaacagaaccggggagtcggggctggttccctcggggatgcgggcgctggggttcccgcagctgctgcagtcggcggcggccagccgaagcagagcgcgtggtgggcagagtgttgggcgccgcggctcctcgtgtgcggtctgggctgctgcgggccgcgggatcgggagccggcggcgtccacttcgcgtgcggagcctcgcgcccccctcaccttcctgtggaggttggcggagcctcgcgggccgcgcccggggtgggggagtgaccgctgggcgggtggcggcggttagggggctgcgcgccggccgcggatggcgtcgcaggcgcgggcgggcgaggctttggggatctgtaggcaggtcttcgggggcttggcgaccagcgccccggttttttcttctccagtccttctctctggtctgtaatggggcgaggggaccccgggatggagcctcggcaccgctgttccggaccgaggctaacggacggcggcgcctctgctcctactagttttctcccggaccaaccgaaaagccgaggcggagcgcgggggtgtgaagatctcggcctgctgggggtccctggagctgagggtgagggtggggccgggtcggtgggacaggccgggtgggccggaggtggcgcggccgcacggctttgttccggaaagcccttaggtggagagcgatgtggggcgcggcagggggatcgcgtagaggaaccttcgcgcaccgcctctccgggtctgggaatctgctgaactccttgcctctcttggggtccctcgaacgccccagctaagaagggcgggggccttgccagggcgcgagcaacatgacgttcaaggtcttcctgtggcttctgtaaagaaatgttcacgtgggagcctgtccacatgggctgtactaaggatctggcacgaggaagaaatatcactgcagaacctgaagccctccgttggaagggtcgttcactcgagtacctattctaagtaacagtgacacaaaacacatgttagaaaaaaacaaaaagtatggtaggttatactgttttttaaaagaaacttttatttatgccttttgctgttaagtcctctaattttacattggaactgagtcattcttggagcaaaactagaataggtttgtatttgttttctttttggatgtgtatctaaattgtacataattaagaaaaagcaagtaatggaaaagctggagatgtagaacttagttccttctaacttagtatgcaattgaaagcctcaagtcaagactcctgtgtattgttttgtattaggactctattgtacaaatatttgagtaccttaatatgagtcagttactttttctagatcttggatccatgccagacaacgcacattctgcagacactggttactccagtggctccttactggaaacataatatcagtgataagtgctgtgaagaaaataaaacaatgatgtgctggtatggatttttaacttttttatgtgatgaaccacagaatgatggttttaaatgtatgaaatacatagaattgcaacagaaaccagttatgaaataatgaagatattaaatatgacatctatattttagtaaagcattagtgaggactgtaaatgatctttaaagaatttggcttaaatttaatctaaaattgctatcaggtatttcacatcgctgtaatttttgcctgcattcgtaactgaagagataagtaaatgtcagaggttaagataaatctttttctttttttacctgtccatatttacaaacattctgcgttccgtacatagacgcctggataagaacccctgtgcaagaatgactttggtgctactttaaaaaaagtggttggggaagacctcataggaaatgacatcaataatagattgcatgataacctatactagttcttactgttaccaatttaaattctaactgcttaaaagctaacacggtccttccctttttttgagcacctgatttgaagtactttgagtaggcctcaagtgtcgtatgcaagtactaatctagggggtgtgcctttttcaaaagtgatttttggagaagataggatgtagtattatagcaaggaaaattcagcatctgggatgatcatttccttctgattagagaaatttaccttgttaatattctgttcacccaacccttctaccctcagtgttgaccaatactggaaaaaatttagggctttggagtgaaattttaaaagttcaaaaccttgatctattaattagtttgcttaccttgaggaagttgcttatcttaatcttctatttgaacttcaagtacaaaaaccctactcacggacttaactgtgaccattaaatgagataaccaaaaggctgaagatgatagtgagttgattttaccttttttctacatacagatgtttcagttctttcattagtggttgaaggtctgcgttctttttctccctccactccctccttgactacccccagaatgagctttgatggtctctactgggcctttgggggggatacattatcctgttgtttttgttctgttacttatatataatactcatggatttatttctacttctcttccattttctaatttataataacatgtgcatcttgttttccctgccaaactaaatttcgtgagggggtacatactgcacagttttttttgtcacatactgcttatgacacatgaatatgcagagcttgtcaagctctttaattaagtttaaaatgctaattgagtgaatcaaaacttaaccattatggttaggctaaaaatgtcagcttgtgtttatatagtgcttacctcagtattggaaatgccatgagtttagtatcagaaggacattattactagtgcattttaaagtgataccagtcatagttgcaaaagaaagtacacaatgggaaatggaagagaaatgtagggaatcaaaacaactagttttttcctttataacggaagttttataattcatcttttatgtaagtgtaattctcattaaaaataccctaaagcttaaagtttgcaaggctgcccagcctaacccacaacagtttgatgctgccccctagcgtttgattcccttcaccttttgctaaaataaggtaatgtttaaattacaattagatttacttactgctgtaaatctggtctattttagtttcctctgggtagttagtgttgctaataagatggacgtaagtgtttttgaactggtgaattctgattgcttttagcccccagttttccaaataggggtgaattctgggtagagatagaacaatcaccaagttaccttgctccaaaaaagaaatttacgtatgggattgttttcaaagcgggaagttagctgtgtaaataacaacaattttatatatttaatctgggcttctccttatcttgaatgatataaaaatctactttctagattaatttagttccatataactttgtattgctttgactgtactgataataaagtttgaaagtgttaaatttacattgtgagcttttttttaaaattcgaatttattttctatgacttttatagaatgattcttaaaaaatagtttcaaggacctcttcatagccacaagatttccttttttatatcattaatattattttatgtgaatactataatgaaacccaagtattcagtttacacacagatattataacacaatataccactacacaaaggcaatgaacagataacattctacaaaatctactttacagaaaggattttctgtagtcaatgcaaactcttaaggttttaggttttatttagattattgcaatatcagtatttcaaactcttttttttctttttattatcccttataagttctatggataggccacaggataacttttagctttttctaaaatatccaaacatattctcaataaaaaattagtggaatgcttaaaagtatagtaggtatgaagaaatatagaatcaaaattacagttttaaataatagtatgtatttatttatatagagacaaggatcttgccatgttgtccaggctggtcacaaactcttgggctcaggcaatcctcccatcttggcctcccaaagtgctgggattacaggcatgagccaccgtgcccagccagtaatactaaattatttccaaattaactgcttaggagaccacatacaatgttcagacatgttaaaacaggacacaattcattgtatcacatcagtaattctgtgtcgaatactgttttcctatcagaacgtaagggtttttttggattgccagatacaaggagtggttatttaatagatttttaatggtagatatttttatgttaaaagatgttagaataggatgctactggtgatacaggtttgcaggcttgtacaagtataaggacaaaatctaaaatcttgctcaggtagtgtttattttcacaatctaaaagtaaatattttgtcataaccttttataatcatgttttataattactcatttttagatactgctgaaagggaggtatcagataatacttatccttgtattaatatttctaatcaattttacccttttatatactcgactttgggggacagcccatcccgttaagatttttagggattagaaaagcaagaatgttgtaggatgtatccttattaatatcattatgtacttccataggacgagaagtattgttataagaactgtgaactacgaaggaggttaattttaatcctctataatgaagatttaatcagtgatcactttaggttttagattttcattgaataaaggaagaagaaaaacctcagtcacttttagtgtagtaagaacatcagagatatgtatcctactgtggtgttcccttttttttttttttgtgagacagtatctctgttccccaggctggagtgcagtggtgagatcagggctcactgcagccctgacctcctgggcttgggtcatccccttacctcatccttcctagtagctgggaatacgggagcgtgtgccaccatgcctagctaatgttttgtattttttattgtagagacaagagtttcaccatgttgcccaggctggtctcaaactcttgaactcaagtgagctacctgccttggcctcctgaagtgctgggattacaggcatgagccaccgtgcccagcctatgctattactttaatatctataaataaaaagaaacaatttcagatattccttgccttcccacctctaggcttttttctaaattcacttttatatatttgaatttttgagttttaaaatagtggtttcccctataattgtctgctggattggcactttaaaaaaaaatctataaattaaatttggatcagcaaactatgggccaaatatccctgcttctgtaaattgttggaacaaaacttgcttattgatgtgtgtattgtctatagctgctcttgcggtaaaatactttagtagaaaaatgttcagtcaaatgatcaattcataggtaatgtgaatttgcaggtgttctttacctacatagtagagaagctttttgtctctttccgctttccatttttcctctgcagagggaattatgctttattatgcttggagtcggaaaaggaatgtgaagcccttggccttcaactgttggttaccaccgaactgtcacactgtttgtagctacttatgtagctctctcacagtttaccttttctaattgaaaagctgattgtgtcttccttgtaactctctcagagcaggaaatggatcatatttttatgccgcctatgtctcatgtcttctttcccttcccctttccctcctatcttctcactcccctcataaagcaattcaaaactgcatgcttacaggcctttaaacaaatattttggtatattaactcagtgcacttctactgaagatgactccttacattattttgcttgcatgtgaagaaatatactttgcactgtgttgtagaggaacatagcttcttgatgaaaggggctagggaaagatttatttaaatactttatcaatataaatgaaacaatacatggtgtgttactacattataaaatgagatcagtaaaacaatgtaagaaaacgtaataataagatagtataatatacacataacgtattctgtgtatatatacattataaggcagtgagatcatgttttctattcccatggaccttttttagaaaagcatatcatattttcataattttttaatgtttggaatatactgtttttaagattttgattttatggtgtttcaagaatatagaagttatgaaaaaaaaagaagagaaaagtaaattgtatattaaaacagaaaaaagatttgggttttaaattaggatagtctatagtttttttctttttttttttttcaacttttattttagattcagggggtacatgtacaggtttgttacctgggttatattgtgtgatgctgaagtttggggcatgaatgatcctgtcatccaggtactgagcatggtgcccaacaactagtttttcagccctttccctcctccttctctcccgttttttccaaataaagtgaataattgaatgtatataacatcttatgaaaacacatacagtgtacatatagaatttattttcaagcaaataatcatgccagttaaaaattgaaaatcagaaaggtatgctaaagttaaatcactgaaatatattaagaaaaaataagttcttataatttcatggaatatataatttctaaaacaaattcttaaatctttttctgtgaagatttttgcgtaaacacaagtacttaaggttttttagttaactgatatgtgtgtgaaagtgttggatgttagtgcaactgacatttttctttttcctaaaaaagaaatagatgttaggggttttagttttttaggagttatttttaattatagcttttcttttaaaaaaaaataagaaaatatacactaaaatatggggagaaaaaacttttaaaatttagcagcagtcatagaagaaattgcagaaaccttaataagtttcattgcatgtacatgaaaacatctatacatgaaagggaaaacatgatcaaaataaaaaggaacagaactgcagggtttttgcagaaaatgtgactgaatcatgttatgtaaaagctcatatatgttggaaaaaatattgagacatcaggaataactttaaaaatatgaattaaaaataaagtaagaccttttatttatttaaaaatttataataatgtgaatgagagtgctatgatcatactgctggtggcagtataaccaagcttaatttctctagaaatcaatttggaaagtaagtatatgacaaaacctgaaaagtgttaaagtttttatagtttttcccctcatcttggaattcattcgaagcaagtaatcaaagataatagcacaaattggaattaaaatgtttgcatattgtgtttcagactgcaaacaggctgggtgcagtggctcacacctgtaatcccagcactttgggaagccggggtgggaggattacttaaggccaagagtttgagaccatcctgggcaacatagggaaaccaccatctcgacaaaaaatttagcccagtgtgaggtcgggcacggtggctcacgcctgtaatcccagcgctttgggaggctgaagggggctggatcacctgaggtcaggagtttgagactagcctggccaacatggcgtctctattaaaaatacaaaaattagctgggtgtggtagcaggtgcctgtaatcccagctacttgggatgctgaggcaggagaattgcttgaacctgggagatggaggttgcagcgagcagagattgcgccattgcactccagcctgggtgacagagcgagactctgtcaaaaaaatgaataaataaaattagctgggtgtggtgctgcgcacctgtagtcccagctatgtaggaggatggcttcagcccaggaatttgagacttcagtgagctatcattgcaccactgcactacagcctgggcaacagtggaaacctgcctcaaaaaataaatacttgaaaaacccacagacaaatgcttgtgaaaatcttaaagctagaattcattttcttccacatgtgacattattttattggtttgtcaactaaaatttaatttataattgccaacttttaggtttttttcaaagttatacatgaatatagtttaaagaatcaaatagttgtgtgaagtttcttggggggaaaaatcagtcccctgtctgttcctttcatattctgcctagagagataaggaaccccttaattcctttagttgattattttgctattcattaccatgtctccagataacatgttcattacttgcagctgattttcagttctaaccattatctatttaatgaagaatgattttagtgctctttcacttctgtgcataccttcctatttcctgtactccagtttctccgtacaattttcattgtaattttggtttagaacagtaattggggttacatttttatgctataaatattattttatacaatgtgccattgtaataaatgactactttcctgcacaactttgttttttctggtaataattagcttgatttttttgtccttttatttaatatgcatatattaaaagaccccagctctgtgtttctgaatgtagctatataagaaaggggaatgtggtcaagactctatgttcaagaattttatgtagttttaaaaaattaattggacagaaagctcccatgttggggaataagtagcctctgtgttgtctgaaacataaaaaaagtcaatgttatacaaagattgacttggagattttttgattatttttttcccatgacgtcatggaaaagaacgatcattttagctggcagtttttacaatggcaagctggtataaaatcaaggatgtataacagtgacaagacactgaaaaagggaagggtgaaaatgcatggaataataaagatttgaggtagtgcagcagtagctatttttagaataaagacagctgtcagtgatgagtggaaagagaacaataagctgttgccaggctggagtatagtggtacgatcacagctcactgcagccttgacctcccgggctcaagtaatcctcccacctgagcctcccaggtagctgggactacaggcatgggctaccacacctggctaatttttaaaacattttctgtagagatggggtttggccatgttgctcaggatgctctcaaattcctgggctcaagccatatgcctgctttggtctcccaaagtgccgggattacaggtgtgagccactgcatctggctggttagcactgtaagtctgcttcataatgcatgtaactaaaatcataaacattttagtagcttcaaaagacatcccaacgactgcatttactaatctcagatgtttgtattcacaaatagcagaacagaggtagcaatattacaggtagctttctccaatatggttccaggttccctgtaatgaaaggctgaaaagcagaaatgcaggtaattgttttgacatttgatgagaaaatgtaggtttgtacatgaatgtatagaatacaataaagatagatatgatgtgttgttgattgatttgatactttaaatcaaggtataaatgtttatattctctctcaagttagtgaaacaggagaactgagttaatgcccaagcttaattagcatgcacttaactttttacatgaatgaatctcagtggaaagattgggttgcctgaactgtgcttttatttatttattggaagagttgcagtggcattccaaactgtgaatatgatttccagtagattagatagctggtgaagtagggggatgaaaaagcaaaccatgaagctgtaagaggattttgtggtccctgctgagaactcattactaaaatactttttatccctggaagaatattctaatgtcagtgaaactggtaaggtgtagtgagtctttccaacttctgctcagatactagtgaattgggtgcctcctgcaatctagagcaggtcttggatgtgctaacgatgcatgtgctcttgtaatattttgttagcattctttcaaaagagtcacaacagagagactcctcccccaccaccatactttttgtaatttaagtgaaagatacataatactacatctaataatggtaataccttaggttaatatatttaattgctttacaaagcagtttcgtatacattggtttatttggtggataagtgtaggtattattttccctgttttgcagagagaaaacagtggcacaaccgggatgaactagagacagaggtttctgattcctggttctgtactgtatacaaaataccacatttaatggatatacgagaagtagggacagaactcaatttatattattaatagcttgcacttaaataacatttaaatattgcaaataatgtaggaaaattaacaaatattttacaaaaatatgtacgtaattttattttgttcttatagttaccataaaatagaacagaaattaacagtcccactttataagtagtaataagacttaaagtggttaagggacttgctcaaggactcatagctaataaatggcagagtcagatctctaacatctttgactcctaggctaatctatcttcactatgcacacagcctcactgcttctctgttactctgtgtgtgccattactgaatcacagaaggaaactaaattgatatttgactacctacattgctgtcaagataaagtttgataaagccattcagtcatatagataccagctgtgtttatatgattgaggctataaaactgatttcaaccatttaaagtagtcctgtaatgaaacttttaaaaaatgaagtcctttatgaaattaggaaactgtatatacatttattgaatagattttcacattaagtttacttaaaacatggtatattatccaggatgagggttttagtgattaatcttttggtttctaccttatttaccttcagaatagcaatctggaacactgaaaaagcttgctttaaaaccttgctaagcaacttatagtatctttccccatcattattagcatattttgtgtgtttgtgtgcatgtgcacatgtgcatacacacatgggtatgaaagaaagaattgcgatacagataataacttctcattcttttatttggtcttcattttcctttaaaaaaatactcgctagagtaaaaagaggtttttgttgttgttgttgtttgtttgttttttggttgttggttttggttttagtgaaatgagttaagtagattacacacaggcaataagtactaaattgatcgggccgggtactgtcgctcgcacccagcactttgggtcacatcccagcactttgggaggctgaggcgggtagattacctgaggtcaggagttcaagaccaacctggccaacatagtgaaaccctgtctctactaaaaatacaaaaattagccaggcaggcgcctgtaatcccagctactcaggaggctgaggcaggataatcccttgaacctgggaggcaaaggttgcagtgagccgagatcgtgccactgtgctccagcctgggcaacagggtgactccctctcagaaaaaaaaaaaaaaaaaattactaagttgattggcctctccagcagttggaactaggattattttagtatttatctgctatttttcttactatgtcagacagtcattttgttaagtaatctaaatttattcacaatgtcttggttttttctattgagtaagtagtattaggagacaatttcttttcccttaaaaaaagtctttgtagtatattttagatgactttaataaagatctcacagtgttctggtttcaagatacacaaatatgctactgtagtagactaaagagcccctgtctttcaagtcagagaaatgccacagacttgaaataacagcttaatcacgttagataccttttctgggtcttagattccttgtacataacattatttagctaaatacacctgaggatttttaaaatctcaaacattctacatttttattatgttcatctatatgaaataaaaaacaatctaagacaaaatatctgtaggaagatttgtcatgttaaccatttgtatatattcctactgaacttgttatttaggtgtttaattttatttaaaatttttaaaatttgtagcttggcattttacacatttcaaaactacaatccaaagcctatagttaaggtttttgtaggctgggcacgatggcttacacctgtaatcccagcagcttgggaggctgaggtggggaggatcccttgagcccaggagtttgagaccagcatgggcaacatagtgagagctcatctctatatgaaaaataaaaatgaataaatgtctttaaaaaaggtttttgagctgggcgctgtgactcacacctgtaatcccaccactttgggaggccaaggcgggtggataacaagttcaggagatcaagaccatcctggccaacatggagaaatcctgtctctactaaaaatgcaaaaattagctgggtgtggtggtgtgtgcctgtagtcccagctactcgggaggctgaggcaggagaatcgcttgaaccctggaggtggaggttgcagtgagcggagatcatgccactgcactccagcctggtgacagagcaagattctgtctccaaaaataaaataaaaaagttttttgtaagcttttacaggagaaattgctatggagaatatcaaccctaattccttttttttttttgacaaaaatagtatatatttattatgtacaacatgtattttgagatatgtatacattgtggaatgtctaaattgagctaacaaatacattatctcacataccatgtttttttgtggtgacaacattcaacaatatagaccatttcacaaatttgcatgttatctttgtgcaggggctatgccaatcttctctgtattttttcaatcttggtgtatgtgctgctgaagcacacaccctaattcctttcatttaaggatctagttaacctttctcttaagtataaccatgtattttgttaagcaatatctttttattacaaaaatgccatttttttctggttagaaaattgattttctattacaatattttttagagtgtgtgtaaaacctgatgaaatttgaataaggttcgtagttaatagtatcgatgtcagtttcttggttttgaacatgtactacagttatgttagatgttattgggaaaagttggggaaagagtacatggaaactctgaactaattttacaacttcttgtgaatcttaaattatttcaaaataagttaaaaaaagcacatttccctttgcgtattattaagtatggatgtgtttctagaaattatgtgttactgattttactaattgaaggttggaataaacttcatgtggggaataaaaattaagttttggatgaaatataacacagctacagaaaagtactcaaatgttaagtgtaaaattcaagcagttttcatgaagtgaagtgcaaccatgtacccagcacccaggtaaggaaataggacattaataggaacccagaattcctctcatgattctgcccagtcactccccacaccaaagtataatcacttcactacacatttagttctggttttagtcttaaatacaagagaatattagtgaacttcattttttctttgcatccaaagcaaaatatttgcattcaaaatagtataataattagcacaatgattaagttcctaactgtaaattagccccactcttaatgcagaaattatacagtgatagaatacttaggcttttaactgtggttatgtattggaaatcaacagcaaaagatgaaaataaatttgttgtggcactgctagttatttaccggaatcccttttcccatttcttgtcagtagcctcatccattgatgtcgacagcacctagcagaactcttcagtagatgtaactcagctgaactgaaaaaatattatcaattataaaactaacatattcttaatgcataaaacttggaaaactccaaaacacaagagacataatagaatattttggcttgggcaaagctgtgtcctataaatgtcagtttttagggttgagtggtatatgggcttctaccatttcccccattcctgtctccatctcagagatcctctttgtgctgtcgatggaaaagattgttaacatctactggaatgcttgggaaactctgtaagttggtgagaccctggcctcctagccaattgagatcatgtgactaaccccttgccagtggaatgtgatgagaagtgatgcctgcaacttctacttcccttgatactgaagaagaaacttctgaacctggacttccattctttctctttccctgttggctggaatatcaactatgtaagaatgttatgtctctgaatgactggagcggagctgcactcagacccggagcagtcatcttttttttttttaatgtccaagtgatttaatatggagtagtcatcttcaactgttattgagagagacaaaaacttgcccatttcttaaaccactgccttttgagaggggtctctttgcaatcaatagctgcttagcctgtgataacaaaatgcatatttcatctaaatgattttttttttcttttgagacagggtcttgctctgtcacccaggctggagtgcacagcacagcacgatcttggctcactacagcctggccctcctgggttcaatcaatcctcccaccttagcctgttaagtagctgggagtacaggcatacaccaccacaccagctaattttttactttttttgtagagataagctctcagtatgttgcctaggctggcctcaaactcctgggctcaaccatcctcctgccttggcctcctactaaagtgccaggattacaggcatgatccaccatacctggcctaaatgattctgaaagcatacatctgctatagtagttctaaactaaagttgcaaagttagtgaatgatttactttaataaataaaaaaaagcacaggtttagtattacctcataacgttgcttgtatcattgtattcctatattctcttaaatgtaagtgattagagtactcaagatacttaaaatcttttccataatagagtatgatgtatttaaaaagtagagacaaatgacgttttaaagcttgtgtaaaccatctacagcttttgtgtttcgtggagtcattcatttgatgatgtctgatcaatatatatgaatgtcctgtttccacctctggtacctattcatttgacagtgagataacatgcattaaagaaacctcatggtatttacatatcagctgaatgaagcaacactcacacctttaattagcatcttctagtggaaaatcaaggtaactgcagggagtgtaacagggagctaaaggaatatgtatcttcctttgcttaacagtggtcttaatcacccacgcctttttatcttcattagtgtacgagtaaaattgatacaccgtttaaatggtgactttatccatgagactgtgagattaaaaaacatctcaaacttaatgctgctttggaattgttttataggctattttaaaaaatgcttaacctatatatgccatatatgataattcaacttaatttattcagatagatcataacattcagttgactaaactattatttattaatttattttgagacaatgtctcttattgcccaggctggagtgcagtggcaagatcagggctcactgcagccttgaccacccaagctcagatgatcctcctaccttggcttctgacacgccaccatgcccaactaattttttttgtattttttttgtagagatggggttctgccatgttgctcaggctggtcttgaacttgcgctcaagatccgccaacctctgcctcccaaagtgttggaattgcaggcgtgagccacagtgcccagcccaaagtatcattttagagaaatggaagtgtttggtaatttatttgtataaataggcactctcaaatgttgtctagcttgcatcaaactcactagaaaggctggataagtcattgctaatttatatgtgtaaataggcactctcaaattttgtgtagcttgcatcagactcactagaaaggctggataagtcattgctgggtcctatccctaatgtttctgttatagtaggtctgggtgggatgcaggaatttgcctttcagatttctagcaagcttatgctgctctcacaaccacagtttgattaaccactgatgcaggttatgtggtatcttttcagatttatagaaaagtacacagaagaataatcaagcacctgaatcccattatcttgctttaacaaatattaaatgttttatcatattgcattagatccctttcccttttttaaagaaataacacactgcaaatgcagttaaatctgtgtacttcctctatcagctgatttccctccttccctttctgagaagataatgactccagaatgtaatcatcccatgttctcttgctacatgaatatatacccccaaataagtaattctgcatgttttaagattgtctgtaaattatacagcatgtatctttttgcaattttaaaaattatatttctgagattattgcatgttaatacaaagtccttcatagtcacatttataactgcagtgtaatctttaaataaatataccatatttatttattctaatgatgagcatttaggttgtagcaggcaacataatggttacacagctgaccacttttccttattttattttatttttgagacagagttttgttctcgttgcccaggctggagtgcaatggcatgatctcggctcactgcaacctccgcctcctgagtccaagcgattctcctgcctcaccttcccgagtagctgagattacaggcacccgccaccaggcctggctaatttttgtgttttagtagagatggggtttcaccatgttggtcaggctggtcttgaactcctgacctcaggtgatccacccgcctcggcctcccaaagtactgggattataggtgtgaaccactgcacccggcctgcttttctttatttacctccttttttcttgaggcctcttattcccccatgttctgtgagtattgcctctcccacatacagtcatatgcattgcttaatgctgagtatgttctgaggtgcaggcttaggtgattttgtcattgtgtgaacatcatagagtatacttagacaaacctagatggtgtagcctgctatacacctacctatagagtatagccagttgcttctaggctacaaacctgttgatatactgaatactgtaggcagttgtgatacaatagtaaatattatgtttaaacatagaaaaggtacagtaaaaattcagtataaaagattttaaaaatggtacaccagtgttgggcactaatatgaatggagcttgcaggactggaagcagctgtgagtgagtcagtgagtgggcagtgagtgaatgtgaaggcctgggacattactatacactactgtaaaccagtgattggctttagcatgggcatgtggtagagacctgactgatcaaagatacgtaaagagaggcttgagggaaatatttttctccctggataaaaagagagacatgaagatgaaccttccatccaaacaagatttctgaggaggaaaaaaaataaaaattgtattttaaaaaagataaatcttccagttttgaatatgattatgcaaggttatcttgggactctgagggtaaatttgagcgtgcttggatttttggtactgtcctagaatcacccatttctcctgacttctttttatgtgaaagttttcctctgttttacccactttggttgagtgttctgttattgcaatagttcacattagaaaaacatttacaatattgtaataaggattctctttttttgagacatagtctcgctctgtcgcccaggctggagtgcagtggcgtgatctcagctcactgcaagctgcgcttcccgggttcatgccattctcctcagcctcccgagtagctcgtactacaggcgcccgtcaccatgcctggctaatttttttgaatcttcagtagagatggagtttcaccgtgttagccaggatgtactcgatctcctgacctcatgatccacccacctcggcctcccaaagtgctgggattacaggcgtgagccaccatgcctggccccagtaaggattcttgaatgtgtctttgcgtgcctaagtgcaagggtaattaaaatggaacttgggggctgtagggtgtgttcatatttggctgtagtaaatgtcaagttgctttccaaaatggctgtaccaatatatacttccaccagacgcataaggtagtttgtttctttatattagacctttacttaacatctagtattgtgagatactaatttttgcctgttactgtcttagagccttatctagatttgaattgcctagattattagtcatcatgttgctgttttaccaacctgttttatgttcttttcatagttgtctatgtagtagtggagtttttttattactatatgtgctttatatactctggatactgatgttttatatacattgtttatatatacacattgcaaatatcttctagtatatggcttgctataagcttccccctcccctgccgccaccgagacagagtcttgctgtgtctcccaggctggcaggctgaagtgtggtggcacaatctcggctcactgcaacctccacctcccgagttcaagcaattctcctgcctcggcctcccgagtagctgggattataggcgcctgccacagcgcctggcctataagctttttttttttttatagtgtcctttattatagagtattttttaaagaatttagttaatcaaaaattttcatcatgatatgtgctttgtgtcttgcctaaaaaatatttccctatcccaaagacataaagacattctcttacattttcttctagaacttgttgataattttgcttttcacatataggtttttaatgttcttggaattgacttttgtgtgtagtgtgaggaagaaacattttcacagtcaatattattgatgctctttcagaactctgttccactccactggcctatctacccctgtgctagttctatgttattttcgttagtataattttataaaaagaagtctttaataccttgctaatcttctgaattgtcttgattgtccttgggtttttgcttttatgagtttttgaatgtgcttatgaagtctcaccaaaactaaacagctaccaggattttaactggcattgagttaaatttgtatatacacttgggaagattttatgtaccttatgcagtatatcccatctattcatgtagatgatgtgtttctccaggtttttcagttctttgctgtccttcaataacatcttaagtttttccttttagtggttttatatgtcttgttctaattaattctagaaaccatacaatgttgtttataattacattttgtgattggttttcagtgaagaaaatttgatttttataaaactttgtattgaaatagactgtgttcagaaagtacacagagcataagtgccatgaattatcacaaagtaaacatatttacataactactactgatatcaggaaagaccattacactttgcagtcccctccattctggtcttctcccaattattaccctctatctctctttcaaaaagtaatcatggccaggtacggtagctcacacctgcaatcttagcactttgggaatttgagttgggaggagtgcttgaggctaggagtttgagaccagcctggacaatagagcaagaccccaaaaagaagaaaattaaaactgagcgtggtggcacacacagctacttggaaggctaaggtggggaagatctcttgtgcctggaagtttaaggctccagtgagctatgattgcgccactgtactctagcctgggtgtcacagtgacatcctgtctcaaaaacaaacaaaaacccacaaagtttagttttattcctttttacctttatataagaattatactgctttctttggtgtttgtcatttttttcccaatatttgtgaaattcatctatgcatgaagctgtaatttcatttttattcctgtgtgatagatttttctgtttcatttatcattttgttgttgattaacatttaggcttttatcagatttttttttttttttttttgaccagagtctgtctctgttgcccatgctggagtgcagtggcacgatcagggctcattgcaacctctgcctcctgggttcgagtgattctcctgtgtcagcctcccaagtagctgggcttacaggcacatgccaccacgcctggctaatttttgtacttttagtaaaaatggttttaccatgtttgctaggcctgtcttaaactcctgacctcaggtgatctgcctgccttggcctcccaaagtgctggaattacaggtgtgagtcaccacacccagccttttttcagttttgactgtgatgaataatgattacgtgaatattcatgttggtattcatgtacatggatttctgttgggcatataccccagattaaaattgctgtgtaagtacataggcttacattcagcttctggcagatcttgccaaacagtttttcagaagatacaatctctaatactactgtcagtacacaagttccatttaactctatatattcttgcctacttttgatattggcagtattttatatttcagttattttcatggggtatatagtggtatctaattgtgattttaatttggtttcctgaagacttctgagctgaacatattttcatttgctttttaggagtttggctgctgttatgaagtgcttgttcaagttacctactcattttttcattgggtcgtcttattgtaattttcatattgatttatagaagttccttatatatttttgagtatacattgtggtagtcttctcccagtctgcagcctgcctttttagttaggttttttttttttttttggatgtctcttgatgaaacataaattcttaatttcagtgtaatatattatcaattttgtgttctatctcgaaggtcttaaaattagtctcccaaatcttcaagatctgcgctttccagtacagtagccagtagccacacgtctgttgagcacttgaaatacagttagactgaattaggatgtgctgtaagtgtaaaatacatgacagatttcaaagacatagtattaaaaagaatgtaaaatattttaataatttttatattgattagatgttgaaattataatattttggatataatgggttaaatagaatagtatgaaattagtttcatctattctggaaaacttcagaattacataattggctcttattatatttctagattcttgaagtatgcttgtccaatagaactttctataatgatggacatgttctgcgtctacgttgtccaacatactagccatttgctacatgtggctgttgagcaattaaaacatagtcagggtgactgagaggctgcattttaaatttaattttagttcatttaagtacccgtatgtgactagtggtggctaccattgaattggacagttctggacactttatcattttagcatttcttgtttcagatttatgttcaggagctattagcaattgatttttgtaatgatgtgaggtaagggtcagattttatttattattttcttttgtgtggaaacctaattgaccaagcaccaaggaaaagaccatcctttccggtttttagcttttgtcttctgttcctttagtctgtttgttattgcaccaaataccacagcatctttgataattcatagagtaaatgcttcaattttgttcctcaaggaatacatcttagccgttcttggccctttctatttccacatcaatattaaaaacagttaatcagttttcacaaaattctgagattttgactggggttgtattggatacatagcttatccagtcataacatgatatagccatccgtttatttaggtcttttatttctctcagtaattttctgtcaataatatttctctcaataatttctctcttttctatgtaaagttcttgtatgtctttggttagatacattcctagctatttgctactgttgtaaatgttactatttttgagttttattttctaattattgctgatatataggaatataatttattactgtccttatattcagtaactgtactaaactaacttattcttaaagattctttaaggcatgctgcataattaattctaccatttgtgaataatgacagtttcacttttctctggttcttaacatattttatcatgaaggaaatggagtaaaactttttttagtggattggcaacttccagagaattagattgttttgaatgtgtctaggtagaaactaatacttgtctctctctttaaatctctttaggaaaaatagaaatgaaggtacatatgcacacaaaattttgcctcatttgtttgctgacatttatttttcatcattgcaaccattgccatgaagaacatgaccatggccctgaagcgcttcacagacagcatcgtggaatgacagaattggagccaagcaaattttcaaagcaagctgctgaaaatgaaaaaaaatactatattgaaaaactttttgagcgttatggtgaaaatggaagattatccttttttggtttggagaaacttttaacaaacttgggccttggagagagaaaagtagttgagattaatcatgaggatcttggccacgatcatgtttctcatttagatattttggcagttcaagagggaaagcattttcactcacataaccaccagcattcccataatcatttaaattcagaaaatcaaactgtgaccagtgtatccacaaaaagaaaccataaatgtgatccagagaaagagacagttgaagtgtctgtaaaatctgatgataaacatatgcatgaccataatcaccgcctacgtcatcaccatcgtttgcatcatcatcttgatcataacaacactcaccattttcataatgattccattactcccagtgagcgtggggagcctagcaatgaaccttcaacagagaccaataaaacccaggaacaatctgatgttaaactaccgaaaggaaagaggaagaaaaaagggaggaaaagtaatgaaaattctgaggttattacaccaggttttccccctaaccatgatcagggtgaacagtatgagcataatcgggtccacaaacctgatcgtgtacataacccaggtcattctcatgtacatcttccagaacgtaatggtcatgatcctggtcgtggacaccaagatcttgatcctgataatgaaggtgaacttcgacatactagaaagagagaagcaccacatgttaaaaataatgcaataatttctttgagaaaagatctaaatgaagatgaccatcatcatgaagtaagtataaaaagatgtccgatagctgcttcgtaattctcacataattgtggtgcattttaaaaacaggataagtaacagtggagtattaatcatatttaaacttatttccatatgtttacctatgaaatatcaggtaatgttcatgaacagaatacattaaggaatcagaatcagtgtaaagatttttaagtatccgggcgcggtggctcacacctgtaatcccagcactttgggaggccgaggcgggtggatcatgaggtcgggagattgagaccatcctggctaacatggtgaaaccccgtctctactaaaaatacaaaaaattagcggggcatggtggcgggcgcctgtagccccagctactcgggaggctgaggtggagaatcacttgaacccgggaggcagaggttgcagtgagccgagatcatgccactgcactccagcctgggcgacaaagtgagtctccatctcaaaaaaagaaagaaaaaagatttttaaaatctgaatttcacttgtatttgtttgtttcttatattctcaaatttggtttcctcaaatccaaacgtatttttaagaaatttttttttgtagcacgtatctgaagacttaagtgttttaatgttgttagaaaatgtattccttatgaattatttgaccctccaagctagtctcttactgttattattgttagccatgttctaggtatttgaaaattaaaattttttaattgttgttcaacttgtcctcttgggaagtaactagaacagtttctagttcataaattgttaatttattgaattaactattgagtggttccaagtcattggtgtagctccaaagtcaggtattttgcacatatggctagcttgttttctctgtgtcactttatgataaggcctacttactcatgataattgtttttgtctcaggcctttcacagacttaggatgaatataaaaaggtataataataagaaactaatagtaatgggatgtcctgttttcctttaaaattttcatactcttgggtacttacacatttggttgactccttgattttctttttaactattcaccttaagcacattcattttagtttcattaaagggatgttgattccttgtttattctatttttagcattcttattaaagtttagaaaaacttgttgagtttgttgttcatatgtatagaaagtagcaccatcaactgtggaaaatgaccacatccttttctgtcactgtcgttgagatatgttttatgtctaggtaaagatctttgtgtttcttcccttgataaatcatcagctatttggttttcagcagttataaacactgattttaaaataacatatattaagatcttagtatgattttaaagtatgcattcattttattattattttcaaaaatttattttttgtaaagatggggtctcactatattgcccagactggtctcaaactcctcgcctcaagtagttctccagccttaacttcccaaagtgctgggattacagtgcattaattattatgacttaggataattaattattatgacttaggataatatcctagaatattttgttgataattacaagattttattgttcatttcctctttgtatcacgtccgtgaggtttgcattattagacttgttaatgctattctgataggtctgatgtatactgggaatctcatgattctgaaatgttcaatacttttaatagagtagtaccttatggtagttaagacctaagaagatcaaaagcaattaagtggtgctaaatagaaaaaaataaaaaataaaaaaaaaaaactaagaagaatcatttttctgtgtttataggttttgattttagtttttgatgggttttttttggtgccatagataaagccatatagtgaggtagcaagtcaataaacaagcatgcaaccagagcagatatatgtgacaaagggacagtgccaatctcttttgccgtaatattagatacttgtttttaaccatatgatggatccaaacttgtttgctatttgttttctgcgttgttttgttttttattatttttttctttctcctctttaatcagttttaagcttactttttttttttgtttgtttttaaagtaccagtggatgaagctgcctttatttttatcttccagttttgttcctatcaaccgacattgggctagaattttccaaaacaatatgcttttagagtgcatttggcaatgaaaatgtctatataagccattaaagtactctaaatctatttaatctgtttcacagataaggatcttgagtcaccgatgattgcaatttgatagggaaatgatttttctcatcatcctacgagagtcttggggatatagttgtgagtcatccttatccatgacagaaagtcattatctttcatgtgttggagtagaaaaattattaaagtccatgaaaagttttgggtaatatagttgagtgtatccctattacaaattcttattaaaaagttttatttgtaatagatatctatgtattacagattatttgcaagtaatatttagagtatttcttaggcagtaatttatttttttgcataatctccttaaagacactcttatttaatttgttttatcactttccttgcagtgtttgaacgtcactcagttattaaaatactatggtcatggtgccaactctcccatctcaactgatttatttacatacctttgccctgcattgttatatcaaatcgacagcagactttgtattgagcattttgacaaacttttagttgaagatataaataaggataaaaacctggttcctgaagatgaggcaaatataggggcatcaggtaagagagattttaagttttttctccttaaaatagtacctgtacttactttttaaactatagttgaattagaaaagaatcctaaattattgactttcttttgttgtcagactttaaatatattttaatcaggtttagatatgcatatttaaaagaaactgggggaagacgggggcacaatgtgttttatttatctcttctggtatattacaaagggatattttgctatggacggagaactagattaaaaatgaaatatagatttgtgataagttgattatttttgatgagcaaatataaataatgggaccccctaaataaagttatttgttcttctaattacttaacatttatcagggtgcctctgttgaaaagcaaagatgattaaaattttaaagacataaaaagggaagctactgtgtgtaaactccaggaatgtctgggaaatgcctaacaaacttgacatgtgaactttattatgggtatttctagagagcttcaactagggtaaaaccaaaactatttttaaatttctcttaggctcttttttcatcgtacccacttggctccaccttggtgttcacaggtacctcccacttaatatttcaaaacttatactccacacaaaatttgtaccccttaatggatcccaaatatcattaatttcattcttttgataaaatctagaactctttgactttctttttctcttttttttcttttcctttttttcccattctataatcaggtatgaagtccagttaaagctatctcttcagtatcttctaacttcatccactctgtcgtaacaattctggattttcttggttattggattgttgaaataacttcataaccttccctgcctgtgttcttgtccccttgcaagacattcttagcacttaaactagatttacctttctaaaatgcaaagagattctgacacagaattttttctttatagtgatagctaacattttgttaatacatactttttaaatcttatttacttaaacacatatcgcagacactgttctaagctgaattcatttactcctcacaacacttttatgagataggtaatgttactcttcccagtaacttttctgatatctcagagctaataagtggtagtactgggatttagtcctgtaaccattttgctatcttatgtgttgttttaaatgcatttttttttcactaaattttggcagtaatcctatgagggagatattatgatccttgtttttaaaaacaagataaggaaactgacagagcccacaaaccctaaggtttgtctgatgaaacctctgagtatctaatccctatgacattgtcttccaaattaagttagttctggtatcacctttgtgatttttcccatatatctttacactatttaatactttgtattttatcactaatatatattttttatatctctggaacatggatttgatgtgatgtgctagttatatttttttctcatacattttaggaaactgcatcatgctatattgttcagagccctttacttggcccacaaggctttccgtaatatgatcctccctgcctgccttgacattcttaacgctcatcattcatttctctcctcttttctcagttctaaccataataaactactgataatagattgtgccatttttctcccatccctttctccctcttcactttctaaacccccatgcctgactgacgactacgattcttcaaagattcagatcaagtattggcccttctgggtaaacttagtgaccatcctaggctaaattatgttcccttccttgacatctctagatgtctccctcatagtatagatcttgggggatcttaataattgaattaatctgtttttgttggactttagttgctttaatacagtgactaaaccatttaagctcttatgttgattgaatgagtacaattgcttaatattagtctataagcgttcagttataatccaggaaagatacttgttgaaatgtgtctttgaagatcattatgtgaatgtatcagtcagcctggtatacttcgataatgaatgttctcaaaattagttggattttcatgaacttttttaccatgaagtaatgaaaaactatgacggaattactgtgaacacagttctggatgaaatgccaaagacagagtggctttagaggatagtaattaaaatgagcaaaatgatgtatatgaatatggacttaaaactgaattctggcataataaaggattgagaggacagaatttttaaacatttcatagcataggaataaggtagacatcccattccaatgtataagaattttatttgagatagagatacaagtaaaaggaaatattattacataaaaagtaaagtcttctaggcacctacatttctatttctggttaatatctttgcaataggaaaataaatttagactagataaattaattataataacctatgctctctactaaaatacaaaaaattagctggatatggtggtgcggcctgtagtcccagctactcgggaggctgaggcaggagaattgcttgaacctgagaggcagaggttgcagtgagctgagatcacgccactgcactccagcctggcaacagagtgagactccgtctcaaaacaaaacaaaacaaaaacctatgtttattgggactttaccatgtgctgtactaaacatttttacaaggatatttcttttaatttattaaacccactatacaggcacttctgtttactttcatttggtgaggaaaaggaggcttagagaataagtcaggtaacttgcccaaggtcacacaaactgctgccaggtagcagagccatgctatgaactatagtattctccttctacaacatataatcataaccactgtgctgtaattcttatacttcctgttctactgtttcctcctgaaaaggttttggagagtgctttgctagaatataagtggcagagaaatgaggccagttttatagaattatttttagtagtattttgacagatttgcaagtattgttttaagtatagataagttggtggtttaaaacaaaatccaagaatggtcttcttggtaaacaagtggggctctctggtaagatgagtaaaaggagagaaagtggggctttgaactggatttgaattctgatcttcgaatagataaatttgtcctctttcttgacttcatgcttattgatcttggtggatgaataagcgccctgagaggcctagtccctctcaggtgcctgtaaattctcactgtggcaggagaaaggggaagctaggtctgagattaaacttaattaaaaataaaatagatttatttgttccttacagagaaaaatggagactgacaagattgatctaaagttaaaactaatagcttttttttcttattttgaaggcttctgaagattcttgttctttgttgttatgttacctgtggattatgacttttaatgagagttgtctgtattgtaatattgccataatcaatatattgtaatgaagctgttgacagatgcttgactatagcaatactgaaagttacagcttattcaatctgaaaagccttagaggaaattgtacttgctttgaaaacaaatatgttactaatagtgaatattgattagttgtttgcaggtggttattagcattgtcagaaatgcagcttgaattaattatgtgctgatagatgctaataattgttagagataatgccctgctagtaattagttttaatgactactgcaccattaagaaaggttaacttgttctatataaatctcccatagtggcacagctactacctcattaactttgttcaaagactgctgtaaacctaatatgctatatactgtgtatggtagaaatcgtttgtttcacaagattggctcatttagtcctagagttgaccctagcttaattaccaaggggggatgtgaataggctgctaagcattttgtgtcaattaaaatgctgaagcagtgtagaaaactgccatcttgcacatgctttgaaccaagttaattagaaagtttccacagatgagcgcttctttttaaaagaatgcattttctctctagataatgagaaagggagtcagtgaataactaagcttgaagacctttagcattttaagcaacccaatttgcagaataagtgaagcttgtttcagacatttggcgcttttttattgcatatggtatcttgggtacatataaagaaaacatttattagtggtatttaatagtttgtatattgttttatataaggtttttaaaagataccttttgtttagtttttgctttataccaaatgaattgtgattaaaaagcacaacaatttggttagaaatcaaaacaattttattaccaccattggttttttttcctacgtgtaggaaattaggatagagtttatgtaagcttaaatttaaatgttataaattctacaaataaagtatttaaataacatgggaaagtattttagtacagtaagttcaaaacaacttcccatttctgctcataggtcaaaaggattattccttggaagattccaagttgttagaaaaatgaactatcatttgaatttgtagtgcttttagaaaactgaagtttttttaaaattaataattcaggataagaagacatgttcgtaatgttgtatacttaggagaatagtagtaggactgttttcctgatgaaatagttgtccagaaatagttgcaatctacagaaaatatctggaaattttctgatttatctgaaaagggaaatctagctttttactccttatttgggactggcaggagtaagtgacaatgtgtgttacatgcaaaataaataattaaccttactacttatgtatatttttagttggcattgaaataaatatattccgataattttatgtagttataagtttgttttgtcaaggtagagatactcttttgcctgtctgcctctatcctaattagctcaaatttagaaggactgccatttggattaataaagttagtaatccttcctactttcatgtttaattgtactttatatttttatagattttcttttctgtgactccacctctatgaggtaaacacaggagtcataaataaatcatttggccaaggattctctgaaaagactgtgatgatttagtggagaaaacagtggattaaaaattagaggactggctaggagcagtggctcacacctgtaatctcagcactttgacagtctgaggcaagagcatcccttgaggccaggagttcgagactagcctgggcaacataaggagaccatgtctctataaataatttttacatttttgaaaaaattagctgggcatggtggtgcatgccggtggtcccacctacttaggaggcggaggcaggaggatgaccttagcgtgggaggttgaggctgtagtgagctgtgatcacaccaccgtactccaacctggataacgaagtgagaacctgtctcaaaaaaaaaagaggactttgggtttagttttaactttgctatttttagctatataaatgtttttaaactgtagtaaaattatataacataaaatttgccattttaacaaatttttttccaattttactgtgatgaaatacagtaacaaaatttgtcattttaaccatttttaagtatacagtttggtgatattaaatacattcataatgttacacaacgatccatactatctgcctctgtaactcttttcatcttgtaaaaccaaagctctatacccattaaatagtaactcctatttccccctctccccagaccctgggacctatcaatctactgtctttatgtttatgattttgattaagcatctcatataaatagaaccatacattatttgcctttttgtgactggcttatttcacttagcgttatgtcctcaaggttcatccatgttgtagcatcagcaatttcttcctggccggtcacagtggctcacgcctataatcccagcactttgggaggctgaggtgggcggatcacctgaggtcaggagttcgagaccagcctgaccaacatggtgaaacctcatttctactaaaaatacaaaaattagctggatgtggtggcgggtgcctgtgatcccagctacttgggacgttgaggcaggagaattgtttgaactgggaggcagaggttgcagtgagccgatatcacaccactgcactccagactgggcaacagagtgagactctctgaaaaaaaaaaaaaaaaaaaaaaaaaagaaagaaattccttcctttttaaggctgaataatattacattacatgtatataccacattttgcttatgcatttatctgtccatagacagttgggttgcttccacagtttagctaatgtgaataatgttgctgtgaacatgggcatctctctctctctctctgagaccctgttttaaattcttttggttatatacccagaagtggaattgccctatcatttggtaattctgtttttaactttttgaggaactgccatactattttccataatggctgtaccattttacattacccccaagagtgcacaagtctcccagtttctccacatctttgccaacacttgttttcttgatagtagtcatcgtaatggtgtgaggtggtatctcattgtagttctgatttgaattttcctaaagattagtgctgttgagcatcttttcatgtgctttttggcaatttgtatatctcctttcagaaaatgcctattacagttctttgcccattttttaatctggttattctttttgttgttgaattttaggagttctctatattctgaatattaatctcccttatcagatatatgatttgcaaatattttctcccattttatgtattgcctttttactctgttgataattgtctttttgtttttaaatttttatttcaataggttttttggggaacaggtggagtttgattacatgaataagttctttagtggtgatttctgagattttgttgcacccatcacccaaccagtgtatactgtacccaatgtgtagttttatcccttacccccctcccaccctttccgctgagtccccgaagttcattgtatcatttttatgcctttgtatcctcatagcttagctcccaattataagtgagaacatacgatgtttggtgttcaattcctgagttacttcacttagaataatagtctccaattccatccaggtttctgcaaatgccattgttttatttctttttatggctgagtagtattccatggtatatatgtgtatctatatatataccacattttctgtatccactcgttggttgatgggcatttgggctggttccatatttttggaattgcaagttgggctgctgtaaacgtgtgtccaagtattctagttgtataatgactttttttcccctgggtagatacctagtcatgagattgctggatcaaatggtagatctacttttagttctttaagtaatctccacactgtttttccatagtggttgtactagtttacattcccaccagcagtgtagaagtgttcccttttcaccacatctatgccaacatctattattttttggttttttgattatgaccattcttgcaggagtgaggtggtatcacattgcggttttgatttgcatttccctggtaattagtgttgttgatcatttttccatatgtttcttggccatttgtgtatcttcttttgagagttgtctattcatgccctgagccacttttagatgggattgtttgtttttctcttgctggtttgtttcagttctttgtagattctggatattagttccttgtcggatgcatagattgtgaagattttctcccactccgtgggttttctgttaactctgctgattattttcttttgctgtgcagaagctttttagttaaattaagtcccatctgtttatctttgtttttattgcatttgcttttgggttcttggcatgaagtctttgcctaagccaatgtctagaagggtgtttccaatgttctggtttcaagtcttagatttaagtctttgctccaccttgagttgatttttttataaggtgagagctgaggatccagtttcattcttctacatatggcttaccagttatcccagcaccatttgttaaatagggtgtcctttccccactttatgtttttgttggctttgttgaagatctgttggcgtatttggctttatttctggtttctctattctgttccattggtctatgtgcctatttttataccagtaccatgctgttttggtggctatggccttatagcatagtttgaagtcaggtaatgtgatacctccagatttgttctttttgcttagtcttgcattggccctgtaggctcttttttggttccatatgaattttaagatttttttttctagttttgtgaagaatgatgatggtattttgatggaaattgcattgaatctgtagattgcttttggcagtgtggtcaatttcacagtatcgattctacctatccatgagcatgggacgtgtttccatttgtttgtgtcatctatgatgtctttcagcactgttttatagttttccttatagaggtctttaacctacttggtttggtatattcctaagttattttatttgtagctattgtaaagggcgttgagttcttgatttgattctcagcttggttgctgttggtgtatagcagagctactgattaattttgtatcctgaaactttgctgaattcatttactagttctgggagctttttggatgagtctttagggttttctaggtacacgatcatatcaggaaacagtgacagtttgacttcctctttaccaatttgggtgcccttgatttctttcccttctctgattgctctggctaggacttccagtactatgatgaatagaagtggtgaaagtggcatccttgtcttgttccggttctcagggaatgctttcaactttttcccatttagtataatattagccgtgggtttgtcatagatggcttttattaccttaaggtatgtcccttctcagcaaaattgctgagggttttaatcataaaggaatgctggattttgtcaaatgctttttctgcatctatcaagatgatcttgtgattttgtttttaattttgtttatgtggtgtatcacatttattgacttgcagatgttaaaccattcctgcatccctagtatgaaatccacttgatcatggtggattaccgttttgatatgctgttggagttggttcactagtattttgttgaggacttttgcatctgtgttcatcaaggatattggtgtgtagttttctttttttgttatgtccttctctcgttttggtattagggtgatacttgcttcatagaatgatttagggaagattccctccttttgtatcctgaggaatagtgtccgtaggattggcaccaattctttgaatgtctgatagaattcagctgtgaatctgtctggtcctggacttttttttgttggctgtttcaatctcgctgcttgttattggtgtgtttctatattttcctggtttgatctaggacggttgtatatttccaggaatttatccatctcatctaggttttctggtttatgtgtgtaaaggtgttcatagtagtcttgagtaataatcttttgtatttctgtggcatcagcagtaatacctcctgtttggtttctaattgagcttatttggatcttctctcttcttagttaatctcactaatggtctatcaattttatttatcttttcaaaaaaccaactttttgtttcatttatcttttgtattgttgtttgtttgtttcagttttatttatttctactctgatctttgttatttcttttcttctgctgggtttgggtttggattgttcttgcttcaccagttctgtgaggtgtgaccttggattgtctatttgtgctctttcagactttttgatgtaataggcatttaatgctataaacttttagcactgcttttgctgtatctcagaagttttgataggttgtgtcactattatcgctcagttcagataattttttaattccctcttgatttcattgttgacacaatgaccattcaggagcaggttatttaatttccttatatttgtatggctttaagtgttccttttgcagttgatttccagttttattccattgtggtctgagacagtacttgatacaattttcattttcttaaatttactgagacttgtttgtgccttgtcatatggtctatcttggagagtgttccatgtgctgatgaatagaatgtatattctgcagttgttgggtagaatgttctgtaaatatctgttccgttcatttgttttagggtatagtttaagttcattgtttctttgctgactttctgtcttgatgatttgtctagtgctgtcagtggagtattaaagtcaaaactcaaggtctgctgtttagattattttgtcccactgggtgctcccttgatatggtgttctccccctttccttaggggagacctgagctacaggattgtttttgttcttctgggttcagccatccagcagagagctactgggctccaggctggtactagggagtgtctgcagagagacctgtggtgtgatccaccttcaggtctttcagctgtggataccagcacctgttcttgaggaggtagcaggagagtgaaatggacactgtgaaggtccttgattttagttttgtttggcgctctggttttgtgttggttggcatcgagccaggatgtggcgctttcaagagtgcatcagctgcagttgtatagggaggatcaggcgatgggtggggctatagagctcccaagagattatgtccttttattgcggacttttcctcaattcaaccaaagatgtggttcttgtccttcctcggtcatgaagatttaggctcgcagatggggtctgaagggtgagcacagcagggttttactgagtgaaagaaagaaatggggaaaacagactctccgcggggccggagtccctgctaaagtgcttctcgcttcgcaggtaggcatcccagattccacacaggaagaagaggggccaggcttctcccagctgcaaacagaggcaacttcctgaggctccaccccagtgcgcattcctctcagtgctcaagccagttggagtttttctggggaccccctcccacctggctgtctcactttgcctttggcaacctgggcaggtagagaaagaccaccaggttggggtagagataggcatggctgagctcagactctccttgggtggggcttcctgtggccgctgtgggggatggggatgtggttcccaggccaatggagttttgttcccagggggattatggctgcctctgctgagtcacacaggtcatcagggaagtgggggaaaactggcagtcacaggcctcaccacactcccacacaacctgcagtcctgaaggtgggtctcactcccaccattcccccggagaagcaccgagtctatttccaggcagccagtgagcaggactgagaactgcccgagatcaccagcctccccactgagaaagcaagtggactcacagtttttttggtgtctcagggagcctgcagaggcaatccagttcctccaaaggtctgtgaattctctcagctttttggtatgttgctgtggtagttcttggaggaaaagttcaggatgtgagtctccacatgctgctctgtccgagcaggagctgcaagctattccagccgcctatccgccatcttaatccgtaattgtcttttgatgcacaaatttttaaaatgtttatgaaatccagtttgtctgtttttttgtttttgcctgtgcctttggtttcatttttcagaaattattctcaaatctaatgttgtgaagcttttgcccagttttcttctaagagttttatagttttaggtcatatatttaatttaggtatttgattcattttgaattaatttttatgtatagtgctaaataagagtccaactgctttcttttgcatgtggatatctggtttttcttgcatcatttgttgaaaagactgttctttctgtcattaaatgatcttgcacccttgtcaaaaatcatttaaccatatatttgaaggcttatttccaggctctctcttctattccattggtatgtctgtttttatgccgttactgaactgttttgattactgtagctttgtgtagtaagttttaaaatcaggaagtgtgagtcctccagttctgtttttgtttttcaagtttatcttggctattttgggttccttgcagtttcacatgaattttaggatgttttttattttttatttctgaaaaaaaaaaaaacctatcattaggattttaatagggattgcattgaatctgtaaatcaacttgggcagcattgacatcttagcaatacagtccacccttaatatctgtgagttctgcatgtgcagattcaaccaacccaaggaccaaaaatatttggggaaaatataaaaataatacaagagtaaaaaaataacacaaataaaaagcaatacaactatttgcatagcatttatattgtgttagatattataaattacagttggcccttgaacaacgtggggggattagcagtgctaatccccgtgtagtcgaaaatttgtgtataacttttcgctctcccaaaatacaactactagtagcctactgttgaccagaagccttaccaataatatagtcaatttatgtcaacagtatgttatatctattatatattgtatattcttagaataaaataagctagagaaaagaaaatatattaagaaaatcataaggaatttatgtagaatttattattaattgtaaggatatgcagcagagaatttattttaagcaaagtgagagtttattggagaaagtatagtacacttggaaaagggccaagcaggtgacttgaaaaatcaagtgcctgtgtggaatctttaggattttctattcgttattcatattaactattcattaaatgaaagtgaatcatgataaaggtcttcattctcatcatcttcatgttgagtaggctgaggacagaggtggaagagggagggatctgttggtcttaactgtctcaggggtggccaaggcagaaaaatatccatgtattaagtggatcctcgcagttcaaacccatgttgctcaatgatcaactataatttaataatgatttaaaatataagagaggatgtgcatagattaaatgcaattattatgctatattacataaggcacttgagcatccacagattttggtgtctgtaggggggtactagaactaatttctgcagataccaagtgatgactgtattaagtcttccaatccgtgaacatggggtatgttttcatttatttgtcttctttaatttctttctgcaatattttgtagttttcttttttactctttttttaaatttaactttcaagttcaagttacacatgcaggtttgttatataggtaaatttgtgtcataggattttgttgtacagattagtcacccaggtattaagcctagtgcccattagttatttttcctgatgctgtccctccccaccttcaccatggaataggcgtcagtgtctcttgttcccctcatagaggggacagcctacagaatgggagaaaaattttgcaaagttatgcatatgacaaagctctaatctccagcatctataaggaatttaaacaaatttacaagaaaaaacgaccccattaaaaagtgggcaaaggacatgaataaacacttttcaataaaagacatacgtgcagccaacaagcatatgaagaaaagctccacatcactgattattagagaaatgcaaatcaaaaccacaatgagataccatcttacaccagtcagaatgttttgtagttttcattgtacaggtcttctacctccttggttaagttaattgctaagtattttattctttttgatgctattgtaagtggaattgttttcataatttccttttcagatggttcattgttagtatatataaaaatgcaactgatttttgtgttaactttgtatcccgctattttgctgaattcattctaatacttttttgtgtgaaatcttttttgttttttttaaacagcagagaatttattttaaggaaagtgagagtttattagagaaagtagagtacttggaagagggccaagcaggcaacttgaaaaatcaagtgcttgtgtggaatctttatgattttctatatgtaagatcaagtgcaaacagatgtaattttacttactcctttccaaattggatgtttttaatttttttcttgcctaattgtttggctagaacttccagtactatattgaatagaagtgatgaaagcaagcatccttgttttgttcttcatcttagaggaaaggctttgtctttcaccattgagtatgatgtttactgtaagtttttcatatatggcttttattatgtaaggttgtttctgtctgttcctagtttgttgagtcttttgatcatgagaggatattgaattttgtcatgtgctttttctgctcattgagatgatcatgtgggtgtttttttctttattctgttaatacatatggatttttatatattgaacttttattgcattccagcaataaatcccatttagtcaggttgtataatccttttaatatgttgctggattttatttgctagttttttttttctttgacaatttttacatctgtgttcataagggatattggtctgtagttgtcatttcttgtagtgtctttgatacctttagtatcagggtaatgctggcctcatagaatgagttagaaagtgttacctcctctttgatttttttggaaaaagtttgagaaggattggtattagttcttctttaaatgttaggtagaatttatcaggtccaggactttgttttgttggaagatttttgatttctgattcagtcttaccagttatagtctattcccattttctgttttttcatgatttagtcttggtaggttttgtgttgccaggaatttgtccatttcatataggttatccagtttgttggtttacagctgttcatagtattctattataatcctttttatttctttgtaatcagtagtaacatccccactttaatttctgaatttagtaatttgtatcttctctctttttcttagtcagtctagctaaaggtttgtcaattttgtgatcttttccaagaatcaactataggtttcattgattttgtttttctgctctctattcatttacctctggtctaatttttattatattcttccttctgctagtcttggcttattttgttcttctttttctagtcccttaagtgtaatgttaagtttttggtttgagatcttacttgttttttcatgtgagtgttaataattatctgtttttcccttagcactagtttagatgtatcccttaagttttggttgtagttttgttttcatttgtctcttaagtattttctaatgtcccttgtaatttcttccttgatccagttgttaagaatatgttgtttaatttctatgaatttgtaaattttccagttttacttcagtagttgatttctaactattccattatggtaggagaagacactttgtattatatttatatttttaaatctcttgagacttaatttgcgacctaatacatggtctatcctggaaaatgttccatgtgcattgatgaatgtttctagtgctgttttgagtagtgttccttatatgtatattagatgtagttggtttattgtattaagtcctctatttccttgcctgtctgctggatagctgttttattcattattgaaagtggagtactgaggtctccaactattatctcccgtcaattgtgacagtttttgttttgtatattttgatattctatttttaggtacataaacgtttataattgttttatcgctgtccttccttgtttcttgtaaccttttttgatttaaaagtctagtttgatattagtttaaccacccctgctctcttttggttactattttcatggaatatcgttttccatcttttcagtttcagcctgtttgtgtctttgatgtaaagtgagtctcttgtatataacacatagttgactcatgtgtttttattcattctgccaatttctgtcagttgattggagagtttaatccatttacatttaaagtaattactgataaggaaggacttctgttattttgctgtttgtttttctgtatgccttaatgctttttttgtccttcattcctactgctaatgtcttccattgtatttagttgactttttttggtagtgaaaaggttaaattcctttttcatttccttttgtgtatattctgtgctgttttcttgtggttattatggggattacgtttagcagcctaaagttaaaacagtctaatttgaatttatatcattttaacttcaatagcatacaaaaattctgctcctttacaacttcatctccacacctttctccacacctttcaggttactgtttagtgtcctttccccttgaaggactctcttatttcttacagggcaagtctagtggcaacaaactccctcagcttttgtttacttgggaatgtcttagtttctccctcacttttgaacgtcaattttgcagcatataggattcttggttgacaattttgttttttcatttaggactttgaatgtatcggtctattgccttctgacccacaaagtttctgttgagaaatctgcttgtaatcttattgagagcttcttatatgtgatgagttgcttctcttgcagctttcaggagtctctcttggtctttcaagagtttgattataatatgtcttggtgtgggtctcttgagttcctcttattggagttcatttagcttcttagatggttatattcatgcccttcatcaaatttgggaagtttttagccattatttcttaaaatattcttgctgtccctcccccccaccccacccctccccttcatcttacttgacttctacagtgtatatggatgttggtctgttggtggtaccctccaggtcccataggctctgttcgtttttagtcaatattttttctttctgttcttcagcatcagtaatttccattgtcctgttttcaagtccactgatacttcagcctgctcaaatctgcctttgaatctctctagtgaatttttcatttcagttattgtacttcgcagttccagagtttctttttgatttatctttagtttttctacccctttattgatacttccattttgtttatacattatcttcttgactttttttttttttttagcatccttcagacagttgttttaaagtcattgtctagtagatctgccattaggtctttttcagggacagtttctgtgattctttttttttttttttttttttttttaatgtgccttgcttttttgtttctttgtatgccttttggttttatgaaaactggacatttgattctaataatatgctaactctggaagtcagattcttctccttccccagggtttgctattttcttgttaaattgtgtttgtttgttattaatttgggttggggagggttattgttttatgctgtctctgtgggataaacataagattttcacaggttttttttgttttttgtttttttgagacaggatctcactttgtcacccaggctggagtgcagtggcatgatcatggctcactacagcctcaaccttctgggctcaggtgatcctcccgcctcagcctccagagtagctggaactacaggcatgtgccaccatgcccagctagtttttgtatttttagtagagatgggtttttgtcatgttgcccaggctggtctcaaacgcctgggctcaggtaatctcccatcacagcctcccagagtgttaggattacaggcatgagccactgcacctagcctatcttcacaggtcctttttgagcctgtgcctttccctaggcatgcatgattactttctaattttctccaagtatgtagttatttttgaattttccaatatttattgcctggctcccaaaagagaaaaaaagaagggaggaaaaagaggtgctggccttttaaatcccctggaagtcactttagccaggagagagatttgcaaaaatgaggagaggtacagcaacatggccacctgtctctgcctgtacttctgtgatcagaatcagtgatcagagtacagatcctcaatatttggggagcaaaatacattttgtctactctagctcctgtaattgtagggtcctgtagattgaattcaggacaccaggcacagcttcctttcaaaggactaaggatggcagatgggtagctgccactaaactaagagctgaaattgatcagaattaaccacattttaccatcgagctttctcctagaagttgcaagccttcaatagactacagagttccaaagtagttaacatcagacagattttgtcagttcatttacagtttaggaggcatacagatttctggtgcttcctactccacagtctttccagaatcctcctcttttaaccatgtttaagtatacagttcattggcattaattacaggatcatactattaaggccatgtttcatttccttcttcaattcttcaaagaaatactttagcatcctgctcccacttgtttaaaatttccatggaaagttcttctcttgtctacagctgatctgggcacaggagttttggcaccagttgagcggaaagtttgttcaactttaatttttctgtcagaattgtgttaggtcaaccagctgagatgtctgtggtgttgagtattgtttgtgctgttaattgttggtccttttcaattagggcacaagtaaattgatttttttcataatatgcattttccatgaactttttgaagaccctctcctagactaataaattccatgatcagataagttgggaaaatgctgcatattgtattcttctttcagagattcacattgcttattaaactgttagaggctctgaaggaacctgtgtaattcagcattaccaaaacttacttgattatcaaatttctcctccctcccctttgaaataccccctatctcatagaactaatgagctcagtttgagaaatgctagattattaaagttttttctagcagtataatatgacaatagctagtatgtggccagttcaagtagctaatcacaagcaaataatttagaacaattctctttttaaaggggcagaataattggcatctttgaaaatatttttataattttcaactctgtcaatcaaggcaatgtatatatgaaggagtaattaactatgttataatatttccagttgtgccctctatgttttatatgcaaaaacaaagttatcaaaagatataggatcaattttagtcctagaatttaggtctttttttttagtcagttaaaaatcttttgaaggtagtctttaaaatattttatatagcaagcatgctatacatatttcctctaaaagaaatagaaaaatatttttaaagagttaaaatgttcaaagtaatacagagactatttattgatttaagttttcttttcatcaaaacactattccacaaaagaactctttttgtgagacagggtctgactctgtcacccaggctggagtgcagtggcatgatcttggcttactgcaatctcagcctcccaggctccagccatcctctcacctcagcctcccaaggagcttggactacaggcacatgccaccacgcccggctaatttttatattttttgcagagatggggttttgccttgttgcccaggctggtctcaaactcctgaccttaatcagcctgtctgcctcgacctcccaaaatgcttggattacaggcataagcaaaggaccctgagccattaaaatatttttactgggtaattttggtgactaattctagtgcattcttggctaaaataattctgattaataaaaatttctaataactatgaagggttatcaggtgtttactttgtatatcttgtgtatttggggtcttgtctgtagttctggcagtccccattcacctatatttacattagtaagtaaatacattttatttttttctcctagagtatcttagagtatgaattactggcttttccaagtagtttagagtgcacattttcaagttcttaattgaagttgcttttaggctgttgcttttagaaaagttgcttctatattagatttttgccaaaataataaggagaaatatatttgtaaagggaaagttatatattactgtgtaagatacagtttatcttcaggttaatgcttttgttaccaactcactttgtcccatgtagttattgtaagttccctgtcctttttatctctatttttttcttcaatatgattggatctagagagctgcagtagttttgacaaaccatttttgatttagctggccaataactttattggctctaagacctcgtgtctaaaatttatacctatgactacttctgacttatttcattaagttcttccactgattttatttttcctgtctataaacgggacaaacaaactagcctggtgatcatcattaagttagcctataaaccttatttgagcatatattttttctttctagaataaggtttttgacatcagctccccgcggtttgtcatcccaacaatagttagttagagcaatcactgccccacccctgcccctgtgtttttttgttgttgttgtttgtttgtttgttttgagatagggtcttactttgtcacccaggctggagtgcagtggcacaatcttagctcactggaacctccgctgcccaagctcaagcgatcgttccacctcagcttcccaagtagctggggctacaggcatgtaccaccgcgcttggctaatttttgtatttttattccatatggagtttcaccgtgttgcccagactggtctcaaactcctggactcaagctatccgcctgcctcagcctcccaaagtgctgtttacaagcgtgagccaccacgccaggccgcaatcctcctcatcctttctttccactaaccaggatatattatttttgtaataaatatgatcctggttcctcaagaattgagttcctgctccttccttaatccaaaatccttgcaaggattgaagccattgaatccaaatctagtgggtagatcctcagccctctaatactggttgtgtttgaatcttattttgcctcttaggttacctatatttatgtgataggaattctcttttaagatacaggggaagccacagagcttctattagtgatagattatctattgttttaattcggtgagataattgagctaatgagtattggctatagtgttaacattactggatattgtgaatacaacgcccattggataaaacagttttattgataaagttcagcctttagtgggacagttagtatcatctccctatctttacttttccttgttgttgaaaattttgagttattttgatgaagagatgtattttttcaatattatatcacagacttaatataaagtctttcagcagatttatagtcctcttagatttgatttgaaaaatagtattttagattaaaatctttataaaattattgctcttcagtgagattttctgtagatagatcttaaaataagcagaattttaaaaactaataacatttctatttcattttaggccaataatagaaattgtaatgaaaatgtccagcccccaaaccactggcatatatttctgatgtcttacctgtttgtgaatgacctagataaagacatgtatacagaattccccttccccaccatacctatttttctttaagtcatattgtgaaaacatttctcttgtgttctgagccagttaaaattatatagtgacttttttttaagtggtaaattgttacagaaacccaaattggaggaatgggagtttggaaccaggtgtggagaaaaaaaatcaagaaaaataggactgaactaacctttgtaacaataaagctaccagtaataagacttttttgttatctcatcatatgaatatatttccatttggggctatgttacatttcttaaactctgtattagaaagatttacaaagattgtaacacgttaaatagatacttggcttttttaatgttctcaggtgagttttataattatattctttaaataaacagctttattgttgtggctctgcctttagacttgggaaatttttatttatagtttagctattaagtgaatcacagccttcagtcattttaagtcactggttcttatctcgtgggccattgaaggtactatttataacttgatctgagtgtcttaattctttttaaaaatgtttaagttagttatatgtcatatttttgttttgtttttaaacaatgccttaaagctttcataatctgggtaaaatagtctaccttctacgattcatttatcttatatttttattctttttggtagtctgttggtttaaattgttatactaatgttgactcttaatttcttttctacagcctggatttgtggtatcatttctatcactgtcattagcctgctttccttgctaggcgtgatcttggttcctatcattaaccaaggatgcttcaaattccttcttacattccttgttgcattagctgtaggaacaatgagtggagacgcccttcttcatctactgccccatgtaagaaatgtttttaatgtttttaaaaatttaaaataaaaatatttaagctgaaagggtccttcattagcaagctatagcacagtaatctagtatttgtattgttttatttgcttataggatgaagtatttttttctccattttcagagttttaatagcaatatttttttaaataaattgaatcattaggtcaactttgctttcaatagtctttaaaaaaaactcattggattaaaatttgcaatatcagtagcagtgagtggtcttttttatctgtgtagcatatcaggttaacctttaggagaaatgcataagatatgttgtaatgattatgcctgtaggtggtatgccatcagcatctttgagcgggagtaggcagatacactcagtgcgctgttttacacttagctctttatacatgggggcatttatcttttcacctgtcatgccagtccttttcttctctttggggacacttctaattatatgatcacaagcccatattcctagtaccatgcttaccaacctttttaaaagttgctctctataacctatcaatagttagttaggtagatagctgtctatcaccagctaagagtatttaattcactcttactatttttacttcaaattatgaaaacaatggggatttttcttttccaaatataaaattgaagtattgagtatttcccttctagagaatttgggagacaggattatatttgtgtgttgtgtatatctcctctcttctgcactcttggttgagaattccagatttagtatctacagcaatatatggcattgcttttttttttttaataaacaggttaatgaatcttaaggctgtgaatatgaagtttttgtttcaccatttctactagccatcaagaatagcaacagtttcctttagaactgggcctagtaagagttattgaagtgagaacagtatttaagtgctgttcaacttgtttttgtattaagaagggttaactaaacctagctgttacctttttgagtggtctgatatcctctgagaggtttagatatctctttggttgaccactagttaacaggaaaagaatacaaataaattttagaacgaagaaagatacctaagtgcagttatctaacttatgttctataagattactgttgtgatacttgtacatttcataatgttgaaacataaccttttctatacatacatttatgattgctaaagctttaaaatatagaaaattacatatttaaggataccctcttgctaactttccacagtatatgcagagatagcgaccttattacctctgaaataattttataagagaagaaattgatgaaataatctgtacaacaactccccctgacataagttgacctgtgtaacaaacctgcacttgtacccctgaacttaaaataaaagttaaaagaaaaaatatatgataatcagtttaagaaagaattagattacagggaatcacaagtgactgctggtgaattagtttgtgtgttttgtttcatttttactaaatatttggcatgtaagtagatcatgttcacttcaatttacaaagaacccatcactccctattgttacttctggcttgattctctcactgtagtatgtatcttattcttatagcatttgacttggtgtctttgagttactgtaaaatgtagtagtattttggacaactgagtaaagcaaattaaatggaagactaagtgagataatatctaggggagcactttaaaacttgaaaggtattttttctgtgtcatttaggagattataattattataatttcaaaattttaaatagcatttcaattatttgtttagaagttttatttgttcttattaatagtctcagggtggacatgatcacagtcaccaacatgcacatgggcatggacattctcatggacatgaatctaacaagtttttggaagaatatgatgctgtattgaaaggacttgttgctctaggaggcatttacttgctatttatcattgaacactgcattagaatgtttaagcactacaaacaacaaagagtaagtattttttatttatttaattttataccataaaactcaaaacaaaaattatccttttctgggtatatgctttccttaattatgatgttggtgtgtattaagtctcagttttgtaacagctaatctttagagtaaaaagctgactttggttttttaaaattaaatatgtggttgttgttgttgtttggtttttttgagacagggtctccctctgtcacctaggctgcaatgcagtgttgtgatcatggctcactgcaaccttgacctcctgggctcaggtgatccttttgccccagcctcccgagtagctgggaccataggcacatgccaccatgcccagctaacttgtatgtatgtatgtatgtatgtatgtatgtatgtatgtatgtatgtatgtattttgagacagattctcgctatgtggcccaggctagaatgcagtgacatgatctccactcacagcaacctccacctcttaggttcaagcaattcttgtgcctcggcctcctaagtgggtaggaccatagctgcgcaccaccatgcctggctagtttttgtatttttagtagagacagggttttgccatgttggccagggtggtcttgaactcctggcttcaagtgatccacctgccttagcctcccaaagtgctgggattacagacatgagccaccatgcctggtgccctctaactattaaaaattatttgtagagacagagttctcagtatgttgcccaggctggtcttgaactcctgggttcaagtgatcctctcaccttagtctctcaaagacttgggattacaggcatgaggcaccacaccctacatgactttgatctttgccatttttgttactacatttattttggcatttataatcaagatacagcagtctcagtttcagttattttgtgttacatcatacctaattgacttaaataggatggcaaaagatattttctaattaagtttattataaaaatgtgaaagtatgtaaagagaagcaagtttcatccgtcttcttaggtaatatttttaatcatgtgacttttattgtagtattttttaatgaaaatgttttcacacaaaaagtgttttcacacttcttactggaggtaagaagtcagattaagggggctttgtaggaagaaaataaaatgaaatgatggaaatggtgactcttttcaagaatgatgcaccactttggagatgatgcttgacgcttggttgaactgttgcttaaatactctgatggtgatgcagctgtctgtttcacctcacatttatgagaatacaaaaaatatctaagaagaattatcctccaagaaagtaaattcagggctgctgccattcactatgatttatactcctccctattcacttcagttcacatctgccttttaaagctctatcctgaatacatctcactaacatgtttgtgatactaacagtgattatcttcagtatattctgtttaagtaaagctttccacaaaaaaaagagttggaaaattcattttgttagttaattccagataccttttttgggatggtcaagatcttaaagatgtgcagtctacttttaagatacaattttatactatttttgtttctgttttgtttgcatatgtgtgtgttttgtatatattcctttcatgatttggaacagatctctgaactgggattcatgggagtgattctggtttacataaaacttatttgtgtgactatgactcactcctcatgatttccagtagttatctaaatcatgagaaagaaatcttacttctcatctgtattttcgtatcttatttcaaattgtatattttagttatatttagtcaggacatcatcacatttgtttgcctccaaaggagaggtgattaagatagcctagaaaagaagaatgataaaaggaactgggaaagttcaacttagagaaaagtaaaagagagctaacagtatttagattttgaaggggcttgtggaaggtgaagtaattaattctgatggacgagtagagaataaaatatggtgggagggatgccaacacagaaggggctgcagggaaacaagagttggctaagtagatgactgcagaataattcaaaagaggtggtggggcttgagtgagggtcatggcagaagaaataggagaggaaaagatgattaagggaattatttagatgggagaatcaagaagacttcttagttgattagatgtaagacatataagtatttaaaagttcatcactacaataaattagatattgcaaagtttgtaaagaagttttagaattgccaattgagcatctctaatgtgacaatctaagatctgaaatgctccagtgagctttccctttaaccatcacgtcagtactcaagtttcagattttggaacatttcagatttcagataaacaagttttttgttttttataatttgatctttttaatctcattttgaacctaagcttactggtgcttatacatttatttttgcaaagaaaactgatacaagaatggagtcaccaaaccatgacagcttttttgtaaatttgaaattgtgggaagtaaaacactggaagaacaccttggatgcagggagtgttctctaaatattaaatagtaaggaattctcaactatatcagagaagggaatctggccagataagtcagggcatctgctttatggtaaataggacaataagtaacctaagatgaaaaggttatggcattcttttgaagaaagggaattagtgatacttgagtagaatagacatttgacagtctgcacagaataatcaactgtttcagctttcaaaccacaagttaaataatacactagatgttgacttgtttcagcaagttggggaccttgagggtaatgatttgcaagcttctaagaaagtggactatcagaaccaaagcaattaaacaaaatctcagctggtgttttcattttctttaatttctatatccttctcattgacttttgtactattgttggctcctccttcccctttttccccttaactcatggttgccgttttttttcttctctttaggacttgtccgtatcattattttcctgtgaatgtcttaactcttcccagtttctatcggcttagtggcttacattaaccattacttctcttattctctgtgccaggattcaaatggggagttcctctctacttgccatttgctagagtctttaacactattacattaaaattcagcaggccactggattaggatgtatagggctggaaagtccaagaatacttcactccctgtctgcatcttaatgcttctccacatggcttctctttctaggagagaccaatcttcttcataggatagtggctggctttcctgagcaaaagcaaaagcttccagatctctataaagctagttttggaagtggcacagcatcacttctcctgcattctattgatcaaaacaagtcaaaaggctagccagaattccagggcaggggggtagattccatgtcctcatgggtggagcagaatgctcatacagggaggaaggaaattgatagtggccatctttgagattaccttatgctctactagccatgcaagcttacttatgcagcagttagacgacttaaacatctgaaacatagttaacagcctataaacaaaaccagcaacaaaaaaatgccatgccagtcagtaagcgtctcccagagaaaacttttttttcaacagtgttctagaataattatttgctttcttaaattagcatacattagaagcagaaatttaagttggaagagttgttagtggtagttacattgataaaagaagaaagcagtaaaagccagactgtgaagacatacagtaagaaaaatttaaacctaaacaatgaagtacaataattagtatttgtaactaattaaggacagattaaattatgttctccatctaagtccaaggtgataagaaaggatgcttgtctttactataagactactaagagtcacttactgtgataggtcctttcatacatcacctcatttaatcctcataaaaatgttatttttatttttacagatgagtattcttatattcaataaatttaacaaacttgcctaagtgtcagatggaaactacaaacttaagattctcactcaaatttgactcttctttacgtcacattcagggaaatatagattgcattaaatgtgaatgaaattcaaacaagctttagttttttggaactttctgttaccttacactattggataagagattttacacatgttatacacgtttcatttgttgcatctaataattcagtactgtgtgctctgttcttaacttcaaagtagatgaatggaacctcttagttgaatatttaaaaaaatacaaatttagttggatttttcatctctggattgctttactcccaagaattttttttcacgcccctttaaaataatttatatataaagttaacaccatttttacctgtaggtgttaatgagtcaatattgttgctaattgtgtcctcacattttatactaatatcagatactattttttttctttttttagggaaaacagaaatggtttatgaaacagaacacagaagaatcaactattggaagaaagctttcagatcacaagttaaacaatacaccagattctgactggcttcaactcaagcctcttgccggtagacagcaattctgactcaagacaaacttttttcttttttttttttcattcaaatttacatttaatttctatttacattcattcaatctgaaattaaataatacagtaaactaaatacaagatgaaaagcagaaaaggtgttaccctcatagcactcttaataaggcagctgaataatttatttactgatagatgcaaagccaacttgggataggagaaacaacagtttaaagagcaaacacatagatgaacctatctttcagatgttactctagatgatccactgagataatacttgtgctataaagataagaattacacaagaaaaagtactgtattaatcagcaacagaccacaggttatgcatgacaaagactttttttttttttgagacagagtctcactctgtcgcccaggctggagtgcagtagcgccatctcggcttactgcaagctccgcctcccgggttcatgccattctcctgcctcagcctccccagtagatgggactacaggcgcccaccaccacgcctggctaatttttttctttgtatttttagtagggacggggtttcaccgtgtcagccaggatggtctccatctcctgacctcgtgatctgcccacctcggcctcccaaagtgctgggattacaggagtgagccaccgcgcccggccgacaaatacttttatgatagtttgtctagcttgctagtgtctcctcctatgaaaaaaggtagatgtttggacattgatgtttttgagaaattaaccattttcaaaatctattcttcataaattcagcatttctcatgggaataatcttagatctagcccttgtaagctaggagccatatgattaaatattcaaaataggtcctatattaaatatatgatccaaggctcagaatattaatactatataagatgcatcttgtttataatcatttattacctgtggtaaagaatgttgaatttatagagtatcacagatgcattctccacccctccccctcagattatcttctgtctcaaaaaatagtgtggaaaaatccctcttgaaggattcaaattagttaaaaccataaaaggggaaaaaacaacataattttcctaaaaatctggttcaagttcaatatttaatactttacattattaatcactgctggtttataaatccaaatttagttattctgtaatgctacaaaccttttttttgagacggagtttcactttgtcacccaggctggagtgcagtggcgtgatcttggctcactgtaagctctacctcctgggttcatgccattctcctgcctcagcctcccgagtagctgggactacaggcgcccgccatcacgcccgtctaattttttgtgtttttagtagagatggggtttcaccatgttagccaggatggtctcaatctcctgacctcgtgattcgcctgcctcagcctcccaaagtgctggggttacaggcgtgagccactgcgcctggcaatgctacaaaccttataatcaaattagtaagcttaagtgattatattttaattaaaaaacagcatgtataaaataaaaatatttcctataatagctgattttaaagaaaataagtgatgaaaaaagcacataatctcttttatatacttacctggtataatcataaagaactctcttagaaactcaagactagtggctgggtgcggtggctcacgcctgtcatcccggcactttgggaggccaaggtgggcagatcaagaggtcaggagttcaagaccagcctgaccaatatggtgaaaccccgtctctactaagaatacaaaaattagccgggtgtggtggcacacacctgtagtcccagttactcagatggctgaggcaagagaatcgcttgaacttgggaggtgggggttgcagtgagccaagatcgcgccattgcgctccagcctgggtgacagagtgagactctgtctcaaaaaaaaaaaaaaaaaaaaaaagaaattcaagactagtaatactgacatcttttaaactaggcttgaatttttacaaataaatataaagaagcaatacagcataggtgtatgctttctgtgacactaatgtgacacttgacatgttttcatagtcatagtagggatatccatttatgaaatagaagttctcaataaactttccacagcaagggaaataaatttcacttaataaacgtgaagtcagaaaaacttatctatttgtgtggctggtaggcatgcaataaatgctttttatgcagaaaagttgcagtgtttgccactattgctggcagtactaattatgaaaacagtttaactggggtggttataccagccagtcacagcgtgcatgttactagtaaataggactgagaaggaatattttggtgtattaagtttcactggaatttggtcaggcagtcaacactacagttagtaaatacatttgaaaacaagtgtcagagtatcacaagccatttactgtctgaaataatgcctgtacatttcagcatagctttttgggttctggcttttcagacatcacaaattgtcagagaacgaggatctgcactttaagtacaattctgctctttatcattattgtagcttctaatttgccagctacagttaataaagttctcagtaggctgctgcaataagggaggagggggtctagagggagtaattttttttaaaaaaggctttctatccaaagatgaactctttccgaacttttatcttcatgctttccagtttttctcctcactttgcctgcttttgatttcagttccctcccgttgacctcatccggagcatcttttaaatctccccccaaacccaatttcttctttgtgtgtgtatgtttgttttgttttgttttgcttattttttaatttaactccagaaatcatttttctattagaatggcttctaaataattttaggaaattatttaagaattctaaaagacattcacttaagaaatgttcattgcactgctattctgtctaggtttaaattagcaaatatccatgcatttaattattgataaagcatatcctttgctataaatacaggaactgatgactcggttgtttctgaagatcgacttaatgaaactgaactgacagatttagaaggccaacaagaatcccctcctaaaaattacctttgtatagaagaggagaaaatcatagaccattctcacagtgatggattacataccattcatgagcatgatctccatgctgctgcacataaccaccacggcgagaacaaaactgtgctgaggaagcataatcaccagtggcaccacaagcattctcatcattcccatggcccctgtcattctggatccgatctgaaagaaacaggaatagctaatatagcctggatggtgatcatgggggatggcatccacaacttcagtgatgggctcgcaattggtaagtggactggaaaccactgtctatgctaatcttatggactataatatgtatgattaaatttggctggagcttaacaaatatatggttatgtatcactctggtcagttgatttttcccaaaggctacagttttgtgttcagttgttacatttggaggtgtaagggtataatttagtggggttttttagaacacgtaaacaaatgtctgtagtatatttctttaataacttgatttctcaaagtagagttaccatattgaaaaaactgcttaacattatattttcaaatgtatttacatatccctaaaagagaacagtttaatttcaatcctaggtttaataaatttgccatatctttgaaaaagcaaaaaaaaaaatttacaacattgaaaatccattgtactaaattcaaatatattagtatcttgctagagtaaacggatattaccagttaaagggaacattaaatgtgatcaatacataattttctttgagatccagactcttttagcacccagaagtaggctttggtttctttcagaaagcggagaccatgtttttgaatttacagtagctgtttttgtttttttttttaaatagagacagtctagatatgcttcccaggctggtcttgaactccaggcctcaagcaacccttctgcctcagcctcccaaagtgctaggattacaggcatgagccacctgctcagcctatagtagctgttaatactaaagaataaataattctgctagtagacctagatgcatttataaatctgacctcagtcctcaatactaccagacaagtaatactttgtgccatttattttccaggtctaggaaagttttgataaggatgttagccatttaaatccctataaagatcaatgtgagagagcaagtacaatcttagacttataagacttaaagttgaccatcaaaccactactttgaagttctgaaaattgttactattcccgagatattagtgagttggaaggctacaaaaatagagaattaaattgaatatggaatattgcttttattgaatagctatttctctagttgttacatacttattataccccactatatgttcaaaaactatagtgtgtaagataagtgagtcactcatatgttaagaaattaatttagataggcaaaagaaactgcatctgtcattaatgaaaatgtgaagagttaagatcagcaaacctcacttgttttttttcttatcttcctcaggtgcagctttcagtgctggattgacaggaggaatcagtacttctatagccgtcttctgtcatgaactgccacatgaattaggtaatataaccttaaaaattttaccagatttcatcaaatctaagacttccttaattgtaattgcattcaaatttcagagatgttcaagcataaaaaatggctgatggcaactatagtgtcactaattgtaagatacttcatgatgttaaaatatgaaaaaaaaaatgctccttaagattgatgaaatgttcatttctgtgtggtttcctttgcattcaataacatagttatgctgttataatgaagattatagattatgactggttcactaagtataacttttaaaaagaaatatttcttaaatgccacattttgctgttaatctacttttatttcatataccatgtagactatatttttaaaagaatcagggtaaagtttgtaattacataattgaaagttgtcctagatgtacctaaggcagtctttcttcataaataatagaaagttaatattgatgttcaaaaatgttacctggatggttattaaagatagataggttcttaactcggttactaaccagcactgaggttttagagtaatcatttatttccaaagctcttattttatgaagtaagaaggttggatgatttctgttttcattttatatattttaatattataatcttaatacccaaaaatctagtatgtgtttcttatgtgattttggtcgaatggaactgaatactcaaaaaataatctttaaaaacctatatttttcttttttcatttaaaaaaatgttttcttgtttattgatacactttcaactatagtaatcatatatattatgttggacttcattctttttttttttcgaatgcatttcccatttgcccttagaaatgagcgctagaaatgagctgcactttttttttctaaaagggaaatgggttacttcctcctcgctttgattcgctttcctgatacaacccttgtgtttcttaccttatgttacttattactgtgttttaaaactctccatcccgattacgatgagttaatttaatctgttgtttctgcccagtactcagaaatgtgctttcgccacattttacatatgtagcacctgttattggacacagcacgtggcctttaatttcctcccatcagagatagtgcattgaacatttctagacttgatacctgtcgacttctctgagatatacactcagaaacagaattgacaggtctagggtatgcatgctaaagcagtatgatttccaaacagcaatatctgaaagttcttgttgccacaaccctcccagcacttggcattaactttctttttttttttttttctttgagacagagtcttcctctgctgcccaggctggagtgcagtggcatgatcttgactcacttcagcctctgtcccctgggttcaagcgattctcatgcctcaagcctcccaagtagctgggactacaggcatgggccactacgcctggctaatttttgtttttttttttttttcgagacagagttttgctcttgttgcccaggatggagtacaatggtgtgatctcggctcacctcaacctccgcctcccgggttcaagtaattctcctgcctcagcctcctgagtagctgcgattacaggcttgtgccaccacgcctggctaattttgtagttttagtagagacggggtttctccatgttggtcaggctggtctcgaactcctgacctcaggtgatctgcctgcctcggcctcccaaagtcctgggattacaggcatgagccactgcgcccggccataatttttgtatttttagtagagacagggtttcaccatgttggccaggctggttttgaactcctgacctcaagtgatctgcctgcctcggcctcccaaagtgccgagattacaggtgtgagccactgcacctggccttaactttttcttttttaccaaggtaatggatgtaaaccatttcttttttattttagttggtatttattggtttaccaatttagtttctctccacatgcaatactactttggttttcttcttttataaattaaaaaacagtagcttaagatgtaaatactcattcacatggaaaatatctgagggaaatggagatggcattaatttgaaagaaaaaatgctaatgccacctttcgaatatgcaagggatttcttcatgtgttttctaatttaatttttctgaaaactcacctggctatgaaatgtctgtcatttgactgtgcgtaattgtcttgatttgtagtatttgctcattttgaatagaacttatcatataaatttcttgaaaaatcaataacttcttacataaagcagtaaaaatatattagtgcatacttggtgctaattccttggggcttgattctgtatggtttcatttaccttgccaacttcagacacataatcttatctcttgttcatgcccattatcctttatccagaccaagtcatcaccgcctttgtggtgtttttgcttagacagttttcatagtctttatatctctggttttattctgttgtagtatatcattgccagatatatctgcttaaatgtgatgttcttatgtaattaaagtcttccagtagctttcctgacatataaaatagagctggattttatatatttttttccccctgtaacagggtctccctctgttgcccaggctggagtgcagtggcttgatcacggcttagtgcagccttgacctcctgggttcaaatgatccttctacctcagcctcctgagtagctgggactacaggcgtgcaccaccatgcccagctaatttttgtatttttgatagatagggtgttgtcatgttgcccaagctggtcttgaactcctgggctcaagtgatccacctccctcaacctcctaaagtgctgggattacaggtgtgagccaccacgcccagctatgagtcacactttcaatgaccttcacttcttctctctacctagctttttagtgttacctgcagtacatcctgttacatgtttttcatttcaactaaatgcaattcaccaaatgtgtagtgtgggtgcctgaatctgtttccttgtttataccattctcctacatggctggcccaaatacttctattcctagtttatcatgttaagaatcttcaactttattactgtcttttacctcatgccttggattactgtttcctcttagttttattgtttgctttctcggggtccttcacccattttcttgttagatgccgtatttcttaaactgtagttttttaatgcacagatacgacgtcttatgctcttctctaactatcacatactgctgttggtctatcacatactgctgttagcctaactccacaaatcaaggctatcagtttttatatatgagttaacatgttgcctcatatttaatctttcacttaaaaactatttttagtaatagacttggataatcacgcatacacctccataatatactagaaaaacctccaactttccttcctgttcatctacccactacctggtaaatggagtgtcaggctacttcaagtttaagtgtggttttactgaattgccataaccttgaaggattcactcagacacagaattgaaaacaagttggagattaaggatggttaccttcttaccaccctttttctgtctgcaatttctcattgaaggagtgacacacaagggctgataaccacatgtagaacaaatgcattacatacattaatagctagggaagcccttgatacccaatgcagagctctggtaaaaaactggagcggagaactctgcttggaccaggaacccctagtgagacattcagacctcagatgtctacctgttttatcccacaaatcagaggctgagatgttgctactgctatgagaagatatgtcaagccagagtatactgaattttgctagagggaaaggagtgggcttttagaaaatgtgcatttttcctaatgttaaattgatgtaaactataccatactgtagctggataggctactagggaagaaacagtgtaaagaaatgacccagcttcctcttctggaggtgacagaaagggctctggtccttgtatctatcaacaagttaggaagtggtctagggaccataaataaaggaagtaaaaatatgattgtggagcctagtttttgccttaaggcacagcaaagggcactttttgtacaataggaccaggtcagtgtccctactctgatcagatcatctattcttactcggagaggaacaggatgtggagaaaggcatacaagcttcttcctcagaactcccaagcacagggaaaatcattcctctataggttgagttagaagcatgggcagatagagccagggagaagtccacttcccactttctaggttaagatgttgacaaagtagtatagtatgtcacatttcaggataatttatttgatctaaaacctattttgccctgttacatttttcattatgaattcttaaaacaattctgagatttccatactgacctcagacccttggaggaaaaacatgttttccaattacattgcaatacatggagactgaccctcagttggtaattccaagttctagtgttccctttctgaacagattgctgtttttcccgtggtatattcactgagacacagaattgaaaacaagttgttttagagattaatgatggttaccttcttaccacttacccctttttctctctgcagtttctgcaggtgttttttgtagttgtgtttaggaatgtgatacgtaaagacatatccttagaaccatagaataacatatagttcagggaatttgactgtaagagacatgaagaaattgaaagcatttgaggaaatagcaaactcacatctcattttgtgtttgctctctggtgtggtaatgggttaaattgcctgaattactaagtcactactctcttttctgtgtttgccgaacttatgtagctgaatttaagttacaatactactttgtcttatctcttcactgttttccaccttccttcaataaggaactgtataagcatttgaagaataatttacagaaaagcctgtagtaggaggaggccatctataggtaatgtaatgttggggaccatccagagggcaggaggaagacagccgcttccaggtttgaactcaggacagatcaaccacctgagtgtcgtctgcactctcagaacagccccagagtcttggactccaccagggtttcacaaactcctgccggaattctgagactcccacagagaggcttttgactgtggatggatgcagaattattcttgtggatgttgggatatgagtgggtcaccttccattttgacatcttggtctatcacaatttcccaaacattcttcttgatgttgagtaatgtgtttcaacttcaaggaaataacattttgattaaaaaaaaaaaatacagccatggggcaagggttagaaaacttacctattgggtactgggtactattgtgtagtataccagggtgaccagtcatacccccacacctcagcatcacataatatacctctgtaacaatcctgcacatgtaccccatgcttctaaaataaaagttgaaaaagaaaaaaatatgtagccatattattaagactcaattaagagaggttatagtgttgtacatttttcctttctgtcaaattaaggattacatagaaatttaaaataagattttcataatgtgttaaattgtccacaggaaattgaacattcattgtatacatttatgtagaattttaacatgtatacaaccattatttaagacaagaataaagaaccttaaaatatatacatgttttaaaaaatctcagtagtggatgttaacagatgttaacatctgtagcattggatctcattagtttaacagctttggcaggcacacctcattcattgtgctaatgatatcccttgtcagcaggaaggaaagaatattgatttatcaaaagatgaatagatttgcatgtttactataaatccctgctgtgaggattcctttgacttagttttaaaatgtttatacaggttctcactgagaagggaaatgaggaaaaagagaaaaatatgcagatacctttgagaatttataacctgagataagactacaaccaagatagattttaaaatgaaataattcacttgatacaaagataagtatacaaaaatcatttgtattgctatatactagtaatcaacagttgaaaataaaatttttaaaaggatctacttataatagcatcaaaaatatgtaatatttcgcttaaatctaacaatatgcatagacctacaaatcatcagtaaaagaaaccaaaggagacttaaatgaagagctataccaggttcagggaccagaagactattgttaagatgttaattttttcctatagacacagtgcattctcagtaaaaaatccagcaggcttttttgcagagatgaacagcttttttaaaaattttatatggaaaggggaaggaacttgaatagccagtagaattttgcaaaagggcagcaaagttgatttaagatttactataaagccaccgtaatcaaaacagttggaattggtgaaagagtagacacataaagcagtggaacaaagcaaagagtcctcacatatatggcaattaatcttcaacaaaagtacaaagaaaattccatgttgaaaggatgggatagtattttcaacaaatggcgctgtaacaattggacatctacatgcaattaaaaaaaaaggaagaaagaaaaatacctttgacccatatctcactatagaaaaaacaatgaactcaaagtaggtaatctaaatggagattcttaaaaatagaagaaaatatagaatatctctgtgtctttgggttaggcaaagtattcttagatacagcactaagcatactccattaaggaaaacagtcataaaatacacttcttacaaattaaaaattcttcacaaaagacagttaacaaaaagggaagccacaaactgggacaaaatatttggacaatacatatctgacaaaagacttcaatcatagtaaaacaaacagcccaacaaaataaaatagacaaaaagacttgaacaaatgtttcactgaagaaagtatacagatgagatttcagatgctggatttcaaattgtgggctgtcaaggatgtggaacagctagagctcctatacattgctggtggggatgcaatttcttataaaattagaaatatgcttaactgtgtggcccagtgaccccacttaataggtgtctgcccaagagaaatgaaaacttatgttgacataaaagcctgtttatgaatgtgtgcagtggctttcttcataattgctaaaaacggtgaacaacttaaatgttctttgctggtgaatatagataaataaactatggttcatctatggaatattactgagcaataaaataattttctgatatacacagtaacacgaatgagtcttacatgcattattctaagtgaacaaaatctaaacttgaaagactacatactgtgtgcttccatttagatgatgttctggtaaaggcaaaattacaggaacagaaagcagattgttggttgcctaagggcaagtggcctaaaaaaattttggaagggtaatgaaaaagttctagagtttaatggtgtttatggttatagggtgtatgtgtttgtccaaattcatagaagtctacatttttaaaaaatgaaatagttgtgtaattataccacagtttttaaaagtattaaatgaaaatagttcgccttgaatcttgatttgttaattcatgctgtttggttgttacttaggaaggaacttaaaccatcttgctatggcaacaaagttggtgtattttgtacccatgacaccgttgttcattgagtattaaataatgctcatttttaaacgcattattaaattataaaaggaagcaatgcattttgtaatctaaaagacacttctgtagtctcagtttgttttacataacctgctaaatgaaattgcctctttagcacagttggtgtgtgatttattgaaaacaaggagaggaaatttgttagggaagttagggagctctttccacagagaaaaagctgagaaagactggagaaaattaacgaaactccaggagagagaagagataaaagctgatattaaatccgggtctcagcaggagaattaaggtatttaggatcagaggagaaaagatgtaaggagaatagcattaggtgaaaactggacaattacaacttagaaaccattggtagataatctccttaggtacattatcttaactttccaaaacaatgctgcagtgtttagtttgtagcaatttgttggaaggtagaaataaaccttgcagtaatttctttattgttaacttctccttgttatagactatgaaccttgtaaccatgagaggtatagaagaataatagatcatgtatttttagatacgtagctgttaagatccttaagggaaagaaacaagcccagttagtattctgtatcgcaccttgcatatgctgagtgttcaataattgattagatgtttgttcatgtagtaactgaaacaaaattattatagtatgtaaagctaatgggtttttttctttcatacctcttcaaggtggaacaagctattgctttcgacccattagcttcaatactataattatctctagcatcattttgtccttccactgacacttctctgagcaatatttttttccccctaatgttccaacttcattatttttcataggcactagtcaagcttgcagataatgttccaactttagacagatgaataagaaaagtgcctttcttcttatttggagggagggggtggcgggaggagagtccattgaggatccttagaaaaagcatttcagtattttccctcctgtgagtttttgtcttacatcagctctgtggtcatggatgatttcacagtcaccagtgtcaccattcttcatcagcacagttagaaacagactttggagtatggcttaataagaacctggcatttgctctattttcagcattgtcgatgctcttcggagcctcagccagatatttatgtgcatcattgtagaagcacggaaaagtggtaggaagagctcttcattcttactacatttttagaattttcaggattaaagtttttctttctgggaaaaaaaaaataactgtaaccatagcataaaatatacttaaagcacctgttacctctgttcttccttaggccatttccctttgaagaaagggtagaagttcgagcagggaggtcttgattgttggttacaagaagagcggtgaccatgtttttttcttttgtaaaaatttgacatttaagttgtacagtagaattgactttttttgtgagtacagttctttgaattttaacatatatatagatttctgtaatcactgccaccatcaggatcagagtagctttgtcacccccaacaacccttgccccgtgctcttcctttagagtcgcagctctccaccatctctgtcccctggcaaccactaactgttcttcattattatagttttgtctgtttcagaatagatatataacctttcagatggacatctttcagtatcatgcctttgagattcatccaagtttttgcatgcattatggtttaataagtaaaatattttatatatcacataaaatactgttattaaaagtgtgtatctttttaatgctgattttatttgttttctcctttcagatttgtgttttaaatcctgtggttttaaaacattcccattgtttcttaattgcaggagattttgcagttcttcttaaagcaggcatgactgtaaagcaagcaattgtatacaacctcctctctgccatgatggcttacataggcatgctcataggcacagctgttggtcagtatgccaataacatcacactttggatctttgcagtcactgcaggcatgttcctctatgtagccttggtggatatggtaagatattttatatttttttgtggtactaaacctgcaaatgaaagaaatccttggaagtggtttgaagccaaactatttttgaaaatataactcattttaaagacataatatcctaaataatctcttaaggaaggacatttaagtaggaggtttccttttatggaaaccagttgagttgctgaaaatgtctgtccatcatgttactatttaaataatcattagtagtagagttataattacagaattattatactactttaaagactttgtaatattggtgtagaagtgttttatttttgttagcaaaattaattttttgagtttgttttatggcaaacaggagagaaatactattcctgttaggtaagccagtcttctggaaggaagtggtatatattccataggatttatgtaatttctcttatttctaaatttagcttaaagttaaatgtaaatgctaacaatttgttttattttgattttactttaataccccaaatatgttagacagtgtatttacagaactagcaattaggtttttatgtttgtttgtttgactagataggacatttactttttttttctggtaagatcacagtcttatttcaaaattatgcagccttttttttttttttatgagatagggtcttgctctgttgcctaggctggagtacagtggcatgaatatggctcactgcagccttgacctcctgggctcaagcaatcctcctgcctcagcccctgagtagctaggactacacatacctgccaccacagccagcaaaaatattttttttaaacttttttttatagagatagggtctttctatgttgcccaggctggtctcaaactcctgggcccaagcagtcttcctgcctcagcctctcaaagtgctgggattacaagtgtgagctaccacacccggcccagcctaaatttttaatcacagaattaatgcctatttatcatagaaggttttgaaaatgtaaacaattgtttctttttgtttacaaagttacctaggagtagtcatcttccctgctgacttttaatatctcatttcctattctcaccctcagctgataaccttgcttctgatttcatggggaacaccgaagctatcaatccacaagttctcatcatcacttctgcttaccttgctgtatctatgcccatttacattctttcctgttaccaaaaggaaatttcctagctggtgctcctgcaaactgttccctagaactgatcctctcgtgctgactccgttaaattctcctttctctttcccacaccatttccccccttctgctggattatttctattagcctataaacctcatattacttctcccttcttaaagaggtgggggacctctcttagttccaacttcccctttagctatcaccctattgctgctctcttttaggatattttggttggttttgttttgggttattttttgagacagggtctcactttgttacccaggccggaatgcaatggtgcaatcatagctcactgcagactcgactccccaggctcaagtgatcctcctgcctctacctcctgagtagctgggaccatgggtgcacaccaccatgcctaattttttttttttttttttttttttttgtagacacggagtctcactatattgcccaggctggtcttgaatgcctggcctcaaacaatgctccagcctcagccttccaaagtgctgagattataggtataagccaacatgccctgcccattgtttatttttaaattttcctctttttttgagccaaacctaagcaggttttccccctgacttttctgccagaactgcttttgtcaaattaaccattgaccatggcatcgctaagtctgccagtcattttccagtcttcatttttcttgtcataacagcagaacttgacagttggtcattctcttttctttgaaatgcttttgtgtcagtaggcttctgtttgtttgtttatttgtttgttgtgagacagtcttgctctgttgcccaggctggagtatagtggcatgatcgcagctcactacaacctccgcctcctgggttcaagcaattttcatgcctcagccacccaagtagctgcgatgacaggcatgtgccatcacgcccagtcttttgtcagtaggtttctataataccacaatttcctggccttttctccaccttgctggcttttctcagactctttactggatcctcctcttctccccctgcatctaaatgttggcaaaagatgtaagtaatttcatctagtttcatggctttaaatatttgttggctgatgattcctaaattcgtatctttattataggcctttcctttaactccagactaatccaactgtacttgaatgtctaaaaggcattgtgcacttgacatgttcagaacagctcttgacgttgccaacactactacttgaccagcctgtcttgcagaagtctccatctcagaaatgatgatacctctattcttctagttgctcaaaaagcttgagtgttgtcctttgactcaactttttgccctcccacatcttgtttgccagaaagtcctgaggcctctttcgcctaaccacctgtaccctcatcattttcatccaagccaccaccatctttctctttttaactactctccctgctctgtccttgccctgccttccaactctgtatcagctcaactagagcaatccttttaagccatagatcacatcatcacatttgtatgcttcacattgtggtttttcatcccattcagagtaaaagtcctaaagttctttctttgacttgcaaagtttttcatcatccttgaacatttccactcccttgtcctccttagttttcctatccttacttcaaatcctcccactctccctgagggacattctgcgtcagggctgtggcacttgctgatcacccctccggaatagttttcctgcagacgtcctcatggctagctcctgcttaggaggcatcttatctaaaatttaaatctccccttcaacatttcatatcctctatccctgctttactttttctcctttgtacgtgtatctcaacctattaacaccattttacttatttatcgtgttcattgtcttccccactaagatgtcagctctgggaggacaggcatttttgtcttattttatatactgctggaaatttagtttatatatagttagtatttccttacatctgtaacactagaaagttacagatacaagaagaatgagtctttacagaaaggatttatagtttaatgaagaagaaaagtcataactacagttattttgatatgtgttatgatagagttttgcaccatgtttgtggaactacagagaggctggctaaaaagttggggaatagaaagtttttccatcaaaaaaatccgagctgagtcctaaagaatggagtttattagaagcaaggggaagggtcgtatgaggaagctgaatgatttataacatcattcctttgaacagtaagtctatagctaggactatattctgaggaaataacatgactactcctgataaaacaagcaaacaaaaataaaacctcactacgtggttctttgcagtagtatttataatgtcacaattatattggaaacactctaaatgttcaagagaaagggaagaaactgtccacatatattttgtgagattttaatgacccagaaattgggtattttctaatgttaagtaggaaaaaatggatccatattgtcgtcaggtaggtgttggccatatcctgacagtcgcacaacatgccataccaaaaagatgagagtttatcttgtaaactttggagagccatgaaaaagtttaagcagtagaatgacatgatcacatttttgtttcagaaagactttggctctatggaggaagacttttattgatttaaagccattcaataagatatcaacagtaccagaagttttagtttgagatacctataggataaccaggtggaagtatctagttgtagaggactttgggtggtgctgtttatcaatcagtatcaaagcatttttatgtaatattttaaacaaatatggccataccggtaggtgttggttggctcttagctgtggttatgacaaacagtgtgggtgttgacattcaggttagaattaaatgtggcaaagccatagttcctattctagttggtatgtatacatatctagagggcatatttctgtaaaacatgctgcatattgtttatgcttaagtatttaaggaaagtcataatgaaaaatctttgtaacaataaaaacttggaaggaggagaaaggatagagtaaaatagtcttactagaaccatatgtaggaagctgtcagtttgaagggccagatagtagatggtttaggctttggggaccatatggtttctgtcacagtttttcaactctgctgtggtagtgtgtggttcctgggacagcgcctctgctgttgtagcacaaaagctgccatagacaatgtgtaaatgaataggcatggccagattcagcatggtttgccaacccttagaccattagttgatttgataaagtgattttgtgaatggtttggacaagaaaataatctttactagctattatataccattaccatagacttttaaacagaatttatgatagcatgctgtagttcttaaatatgacctttaagagattgctaaaatataccatagcactgtcagagcatggtggttagattaattgtacccattatttaataacaaataatgatgtttcttcctagacaggaagaagtatgaattaagaattatgtgacttaacactagatttctcctccctaaacccaaatcaccaagatactgttttggagcaaaacgtagtgtcccagagggtagcatatcagtgtcatctttctgtagataatgactgcaaatttgaattatgtttgcagaaaagtgaaagtaaaaattggaagtagcaattccttcacaattttagattaggtttgggtggaaagaatgtatgcctataatgatgcaaatgtatttcttccacaaatcttatttacttagacaaattaaaggaatttaatttttatattttgaatctacagattattcttagatgtaatagtatgtggtatgctttagaaattaagtatataaacttttcttttcttttttttttgagacggagttttgctcttgttgcccaggacggagtacagtggcgcaatcttggctcaccgcaacctccgcctcctgggttcaagcagttctcctgcctcagcctcctgagtagctgggattacaggcatgcaccaccatgcccagctgattttgtatttttaatagagacggagttactctatgttgttcaggctggtctcaaactcccgacctcagttgatctgcccgcctcggcctctcaaaactgctgggattacaggcatgagccacaacgcccagccatatataaacttttcaaagcactgtgccttcaaagatgtgataattttcagaattttgaaattttaacaatattaagagaatacactgtgagggcagtgtgcatgacttggtactagttatgctggatagctctgctaggttgttttctgtgtctgttattggaatgaaagcaatggcataagggcatagagatgccaatttggatttgtccccaagtatctctttgctgtcatgagcagtgggaaataagaatttcaagtggaaaagagtgaagaagtgaaaccattttgaattaggccatttcccaaaagaatcttcctttttttttaaaaaaaaaaaaaaaaaaaaaaagtttttttgagatggagttttgctctgttgcccaggctggagtgcagtggtgtgatctcagctcactgcaacctttgcctcccaggttcaaatgattctcctgcctcagcctcccgagtagctgggactacaagcgtgccccaccacgcccagctaatttttgtatttttatgggtttcaccatattggccaggctggtcttgaactcctgaccccatgatccgcccacctcggccttccaaagtgctgggatttatgggcgtgagccaccgtgcccggcccaagaatcttgctttcttattgagtttaagatacattagtaaatgtgggaattgtggtgatcggtttttggagtgtcttattggtaataagttgctttatgctttagcataaagtaaaatgtcagaatttataaggtcagtggatagtaactgtttgaaaaatgactaatgtgcatattttaagtgtttgttgtggggggatgaggaggagggaacagagttagtatttcctagcaaaagcataaaatttcttcagtatttgactaaaatacatctggtgggtagcattgtgttcaataaaataattattttgtctgtagttacacttcagtcactaattttcttaagtaggaaaatgtttttaaaaactgttttgagcagaagtattatacaaagtttaatgtgaagatttatttttctagcttccagaaatgttgcatggtgatggtgacaatgaagaacatggcttttgtcctgtggggcaattcatccttcagaatttaggattgctctttggatttgccattatgctggtgattgccctctatgaagataaaattgtgtttgacatccagttttgacctttcccagtaatcactgttgattacgagaatgttaccatgcagctttgcatctgttccttgtactgtatgcacattgctcaaaggaaagtcagtggcttgcactacttacaagtttcatagatttgagcctaaccacaagaggctggtgcttagtactgttttccctgcacgtaggggtcttttaaaaatataaagcttgtgataaagagaggagaatatgggactccatgaaccagtgttgatatgtttgattaagacttttcacaaaataatcatataaaacactagtctctttattagtagaaacttctgtggctatgcagaaatagagatcgaaccaaaaaaaatcatttaaactttaaaaatattttaaatggactttggggagacattttttgtgtgttttaagaatgaattgtagtgctctttaattcagctacatatattcatgtggtgatagggatcaacttgacacaactttgaaactgcataaagtagacataggaactagaggaaagctcaggctgcattagagtatgaatttagcattgggaaaagcccttattcttgaatctagagttactatttttgtatatatttgcatagtgtttaaacctgcagcctaaactactgaaatttgtgattgtatgtttgtgtgagcttcagtttaatgaaagattcataatggttctttgtattattataatacttggtgttggggtgttctttctgttttgttttttactttaattttgttttgatttttttttttttttttggcgggggtaggtgagggtttggagcatgtggtctttttaaaaaattgtaaccctctagaaaatatcaaagaaatgaaccagacgtggtttaaatagttgattttcctattttaacagtaccaactagttaattgggaaatgtaagttctgaatgttcacattgctttaccagtttggcactggaaccaagagcacatgtcgtggctggctacaaggttgtaaagcagaaaatcgaagtttaccatgtctgtaatgtgtacatgaagtgtcaatttagaacagttactaggataaactccattattgccatggctgtcatggtacccaagtgacttggaagatgcatttaaattactcagctgaaatcacttgatcatcttgtgccaagatatgctgttggtgcctgatagggattagtcttttaggtgccctgttctcctaccataattgtgaatgatttgtgagaagtgcaagccatgtttatcctgaatttttacttaataatttgtattactagtcatatgcatgtagctttctgtttacatcctatgccacatggtcttcatttatgccaggtaaactgtatttgaactatgtgcagctagctttgttttaatctgcttggcaaccagtgtagctgctgtaacaatctatcttattgttcaaatatataagagccaaactcttttccattccatctaaaatgttttcatttagtactcttctttcctcctactctatgaacttcaaaacaaaaacaaaactttgagagcagcacatgcatccaggtatttatagattattgccagtgtcttttctgtatgctataagcaagggagcttaggtgttatttctttaatttatgcttgaatctgaaaaattatttctgacttactccatggcctccttataataagtagaagttttatatataattaattttcagcattgggcactgaattaggacagtcctcatctcattgcttggcccttcaagcaacctagctaaaaggtgctgatattttatttagtactgccaacttcaagtgatttagatatctatctatctatctagatttctgaaccaagatatatttatagttcacttttgggtttttatacccacggtaggattctgcattccagcattaaatctgcttcattttagaacctttataaaagcaatagctggaatatactcccagttttaaaataaataaatgcctgattgatttaaagcaagtaggttatgctgaagtatataaagaagttttatattctctcaaaaatggtattatctttctttatttgctagattcttacaaatcttttaagagggctgtaacagttgctgctagtattagggttccacatcattctaatgtatagtttcaagtcttaatagacaatctgaattccactacatttcttttggctccaacattccttttagcttgaccagtctaatttaaaatgtgtttgttggaggtcattaacgttacttgtacaatgctgtcactgtgtgacatccatatgaattttggtatatatcaatcaatcaatcaatcacattgcattcaatcaatcagctgtgattgattgattatgcttagaaatactatagtaactagatgcagtgtgaattttttccattaacaaacaaacaagtcagtggcttaaatgtgattatggtcctgcaaggtgattcttgctaaaatatctaaacttttgttttgttttaactgaatcattttttaacttaaaaagctggaaaatatcaaatgctgttttttttttttcattgtcaacagtggtgtgtcattttatgtatgttcctaatgcttatggaactcctccaaaataaagttactcaaagagagcaaatatgccagtgtgttttctttagtctttatttcagaacatttccttacatttaagtatgagtcatattaagtttagctgcatttgctcataagtaaattcataattataactttagtcaaatgtatttaaacaaacaaaaaaaaaggtttaagtagtaaaatatgctttctctactcagccagccaacaagaaataaataggaacaaggaaatgatgtcttctggttatgaattaagttgacataacagtgctacacctcgtccaatccagtgttccttgggttggtcagagggaagagtcatggcaatcacaaaattcgtggaatggccagtggtggataatactcctctccgctcacttgtcttatacaatggagcaacataacttggccgttttggtatatctgccctcttacagggctttagccacatctggaagaaagtacataacacctctttaagtcaaggctgtttgttaaatgtacatgtgtttgagcctactatagtattctcagagtaaggttatgcatgcagatttctgtggcccaaatttattttcaccagcagtgttgttgtgattgctcaaaacattttatagaactctcataactgaaaaaaatagttttcgccttctctttctaaaagcatattttctacctatttatctctcactcagccacaattacctgggaaatgacttttagtgcttacaatgataaaaaaaaaatcagatacactttcaaaggagagaattgccacactgatactgagaatcatgtgcctttatattaattgaaagccagtcccaaaaaattctgaagggatttttatcaacagctgtatagctagagaaccttcccattttaggagactattataaaggagatagatactatatatattatgctgtttaaaatataattgcattcctttataaccacaatctataccccattctttttagtcattaaattcctacaatttgttattagacctcatcaatcttaaaaataagattttgaggcagtttgatctttgaatgtaagagtaagaacaaactatgttcataaagatattttagaatttaattcaatttatttttctggagtggaagtaatagcaatcctcgagatgataggacttgacagccccaatgttcagacccctcttttaggtttctcaggtcaaaacacagattgttgaaggagcttataaggatgccagtttctctatttctcccacttaactgtggaatccagattttcataagggggatccacaaggcagttttgcaaatactaactacaatgtaaaactcgaagcactcttcctaactcagatttcatttcaaccccaggggatttttctaatgagaatttttatttctaactagctgcttattcaggagaatcattatccatttataaattaatttcttcttgtacacactgcaagctacttaagagtttccatgtgaaagaaagactaaatttcgatcagctcctgaaattgcatttatttgtccttgaaactttcaatttgggtcttgtattttaaacttttgtgcccatggtattttaaaatgtatgacagctttctcgcaattggctgtcagttgacccctcactgatcctgttacagttgctctgaaggggtttttaacctgtctttgagctgctgccagaatcctgcaaagaaaattcacataaatcccactgcctatattttatcacagcatcccagatctacccttcaaattgctattttcttaagccattttctcatgatgcagttatagattgaatcttaattatattttacaaagcttaatctgccaatactggataggtgcctaggaaatgtggctttttaaattgatggtttttgtaatctttaatctgcaaatttcacattttcaagtcaaagtataagaaaaatataatgaacacgtgtgtgtgtatgtatatacagtggacctcactatttgtggattccacatttccaaatttgcctactcaccaaagtttatttctaatcctaaaatcaattggcagcattgtcgcgctccttggtggacatttgcagagcatcaaagatttgcatcatccaacacacgttcccagctcgggttgaaccaggtgaggctctgctttcttgtttcacctcataaccgtaaacaagtgtccttttcgtggcctatttagtaccaggtttttcacatttttgtgtttttgttggcgatttcactgtttaaaatgacccccatgtgtaacacagtgctgtttttttgttttgttttgttttggagatggagtttcactcttgttgcccaggctggagtgcaatggtgcgatctaagctcaccgcaacctccacctcccaggttcaagcgattctcctgcctcagcctccctagtagctgggattacaggcacctgccaacacacccggctaatttttgtattttcagtagagactggggtttctccatgttggtcaggctggtctcaaactcccgacctcaggtgatccgtctgccttggcctcccaaagtgctgagattacaggtgtgagccactgcgcccagccagtgctaagtgcaagaaggctgatgcgcctcatagagaaaatattagctcatgcctcaacgaagctcatagcattttgaccatgagttaatgttaatgactcaacattgtgtattaaataaggtgtctttaaacagacacaaaataaaggttatttactgatcagctaacaaaaatgttgtgaccaaagaaagaaccctgtatttatttccccaggagcaatggttcagtatttgctaattcaatgttggaagcaactttatagaacataattaccatgaataacaagaattgactgtatatgtgtgtgtgtgtgtgtgtgtgtgtgtgtatatatatatatatatatacatatacacacacacatatgtatacacatatatacacacaatatggggtctattttatatataatatataaaatatgtataaaataattccacatgtatatataattagaatttactaaccacaggcactgtatcataaagaattttgggatgcgattctgcaagtttcttgatctttctattccaggaagctccatccagaaataatccgtgaatgaaaacacctaaatataaaagaaacacattaatataacacttgaaatatgcattttgattgagttctgaatctgaaatttctacatgtaagtactatgcaggtgatactagatttgcagcctaagatttgttctccaatgaaagcaatctcctgagtgttttaacatccatatttcaagaacattgaaactttgcctagtgaaataagacaatagtaaaattaggtgtggaagacgagaggaaagaaattttaaacaggtctatgggaagttctcagtgtgtgtgtgtgaacattatcaaatttatattgttaattggtcaatgattatactgtgttttcagaagctgtgaaatctagggaaaaaaatagttcttaatgtaatagggatccagtggtggctagtgggcagcatatgaacaaagtacccttctgcagatctctaatgtcgtaagaattaaattgctcctccccttttagaatttattcttactgccaagagctctccttagtctgttgatgatgaaagacacatgatgaactctctctagaatgtcatgttgtacactaacagctaaagagtacaatttaggcaatcagtgaaacatgagttactttctttggctttacatatcagtaaagcctcatggattggagtctgcaggtaaaactgattgtaacagtacagatgtcaagcaatgtagactttgggaagaccaaagttttagttcctaatttgttgtgtgaccttgagcaattaatttaacttcaaaacctgttttgtcatctggagaacaaccttaaaaacatttgtaaaatagtaatatctgttttgtccaccttgtagagttgttagaatcaaatcagctaacatagggggaaatgcctttgtagagtagcatatgaaaatctacttgagcagtgctgtccagtagaacattttgcagtgatggaaatgttctatgtgttgtcctgtatggtagccgctagctataagaggctggtattagtaagctgaacacttgaaatgtggctggtgtgaccaaataactgaattttaaattttattttaattatagttaaatttaaatggccacatgtggataatttaatgatagagttgagggaaagacttaccctttctcttctctgggttttagctgatgggaagaatacgtcggaatatagtatcagttttattaattgacaaagcacttgtccaataactgccagtgtataactctggtaaagctggattgcaaaatggaccttgattccagggcagtggaggggtggacttgcgtgaggggagagatgggtctgcagagcacattctgcgtctttacctctgtggccagctctaaggcctgtccatcagtcaccaaaacaggtggggatagggcaaagtaagagaactttatagtatggaatacaatggaaaagaaagagaacctacacacaggtccaagtgagctatttaataccctgcctcactgactcgaaaacattgcccaacaaatttctgcctctaaccaatcagattagttattcctcatttgggaagagtgataatataatagaaagtaaacaaaagagttcatttcaacacctagaaaagtggtgatagggataaacgttctttccaacccatcaattgtataggagatataatgagaatctttaaatacattcttatttctcatggctagtaaggaccatgaggatatagatacatagaatatatagaaaatgacaggtagatgttaacaggtcctttttaacagctgtcctgctctatgagtgatgccctttgccatctgtgagatgtcatcagcacatagtgtcagctatggtttttctagttcctctcttttacactattctctgcctcccttcatgctgtgcagtgctgtcaactggtgactgagtcacctagtagtacctagcaattcagataagaggaatcttaggtaattgcatctacaatataggatgctgtgacgattaatattgtcaacttgattgggttgaagtatgcaaaatattattcctgggtgtgtctaagagggtgttgccaaaggagattaacatttgagtcaattggattgggagaggcagacccaccctcagtgtgggtggacaccatctaatcagcttccagttcagctagaataaagcaggcagaagttggaaagagcagacttgctaagccttctggccttcatctttctcccatgctggatgcttcccacccttaaacatcagcctccaagttctttggcttttggactttcggacttactctagtggtttgccaggggctcttgggcctgcggccacagactgaaggctgcgctgtctgcttccgtacttttgaggttttgggactgggactgatccactactggcttccttgctccttaacttgcagacggcttatcgtgggactttaccttgtgattgtgtgagtcaattctccttaataaactccctctcatatatacatatatcctattagttctgtccctctagagaaccctaatacagatttcaaatactaaaaaacgttcagcagcactgtagcctttaggtgccccttttcattgtattttaatttaatcttagctatataaggatgacagtgttatgaggcccagaccctagaaacaggaacataacaaaaatatgtctaaagtatggtaaaggggtagagattggaaaaaaagaaacttggcttctatcccaagctgttctcaggtgggatctatgtccctcccactagggtcctatgagaaagtgattccttggggaaaaacccatttatctaaatcattccatggattctctatttctttctgataattagctaagtaggaaggaaaaagctaggatgacaaaaaggctaatttgtggatatatgtgcttattggtgaaacgtatatgtgtattggtaagtaaataaagttcaagattttgcagaaatgtatcagctattataaattaagcctgcaccggacacctttcaagatggccaaataggaacagctccagtctacagctcccagcatgagtgacacagaagacaggtgatttctgcatttccatctgaggtaccgggctcatctcactagggagtgccagacagtgggtgcaggacagtaggtgcagcgcaccatgcgccacccgaagcagggcaaggcattgcctcactcgggaagcgcaaggggtcagggagttccctttcctagtcaaagaaaggggtgacagacaccacctggaaaatcgggtcactcccaccctaatactgcccttttctgacgggcttaaaaaacggcgcaccaggagattatatcctacacctggctcggaggggcctacgcccacggagtctcgctgattgctagcacagcagtctgagatcaaactgcaaggcggcagtgaggctgggggaggggcgcccgccattgcccaggcttgcctaggtaaacaaagcagccaggaagcttgaactgggtggagcccaccacagctcaaggaggcctgcctacctctgggggcagggcacagacaaacaaacaaaaagacagcagtaacctctgcagacttaaatgtccctgtctgacagctttgaggagagcagtggttctcccagcatgcagccggagatatgagaacgggcagactgcctcctcaagtgggtccctgacccctcacccccgagcagcctaactgggaggcatcccccagtaggggcagactgacacctcacacggccgggtactcctctgagacaaaacttccagaggaacaatcagacagcagcattcacggttcacgaaaatccgctgttctgcagccaccgctgctgttacccaggcaaacagggtccggagtggacctctagcaaactccaacagacctgcagctgagggtcctgtctgttagaaggaaaactaacaaacagaaaggacatccacaccaaaaacccatctgtacatcaccatcatcaaagatcaaaagtagataaaaccacaaagatggggaaaaaacagagcagaaaaactggaaactttaaaaagcagagcgcctctcctcctccaaaggaatgcagttcctcaccagcaacggaacagagctggacggagaatgactttgacgagctgagagaagaaggcttcagacgatcaaactacactgagctacaggaggaaattcaaaccaaaggcaaagaagttaaaaactttgataaaaatttagacgaatgtgtaactagaataaccaatagagagaagtgcttaaaggagctgatggagctgaaagccaaggctcaagaactacgtgaagaatgcagaagcctcaggagccgatgcgatcaactggaagaaagggtatcagtgatggaagatgaaatgaatgaaatgaagcgagaagggaagtttagagaaaaaagaataaaaagaaatgaacaaagcctccaagaaatatgggattatgtgaaaagaccaaatctacgtctcattggtgtacctgaaagtgacgaggagaatggaaccaagttggaaaacactctgcaggatgttatccaggagaacttccccaatctagcaaggcaggccaacattcagattcaggaaatacagagaacgccacaaagatactcctcgagaagagcaactccaagacacataattgtcagattcaccaaagtggaaatgaaggaaaaaatcttaagggcagccagagacaaaggtcgggttacccacaaagggaagcccatcagactaacagcagatctctgggcagaaactctacaagccagaagagagtgggggccaatattcaacattcttaaagaattttcaacccagaatttcatatccagccaaactaagcttcataagtgaaggagaaataaaatactttaccgacaagcaaatgctgagagatgttgtcaccaccaggcctgccctaaaagagctcctgaaggaagcactaaacatggaaagaacaaccggtaccagccactgcaaaatcatgccaaattgtaaagaccatcaaggctaggaagaaactgcatcaactaacgagcaaaataaccagttaacatcataatgacacaatcaaattcacacataacaatattaactttaaatgtaaatggactaaatgctccaattaaaagacacagactggcaaattggataaagagtcaagacccatcagtgtgctgtattcaggaaatccatctcacgtgcagagacacataggctcaagataaaaggatggaggaagatctaccaagcaaatggaaaacaaaaaaaggcaggggttgcaatcctagtctctgataaaacactttaaaccaacaaagatcaaaagagacaaagaaggccattacataatgggaaagggatcaattcaacaagaagagctaactatcctaaatatatatgcacccaatacaggagcacccagattcataaagcaagtcctgagtgacctacaaagagacttagactcccacacaataataatgagagactttaacaccccattgtcaatattagagatcaacgagacagaaagttaacaaggatatccaggaattgaactcagctctgcaccaagcggacctaatagacatctacagaactctccaccccaaatcaacagaatatacatttttttcagcaccgtaacacacctattccaaaattgaccacatagttggaagtaaagctgtcctcagcaaatgtaaaagaatagaaattataacaaactgtctttcagaccacagtgcaatcaaactagaactcaggattaagaaactcactcaaaaccactcaactacatggaaactcaacaacctgctcctgaatgactactgggtacataacgaaatgaaggcagaaataaagatgttctttgaaaccaacaagaacaaagacacaacataccagaatctctgggacacattcaaagcagtgtgtagagggaaatttatagcactaaatgcccacaagagaaagtaggaaagatccaaaattgacaccctaacatcaccattaaaagaactagaaaagcaagagcaaacacattcaaaagctagcagaaggcaagaaataactaaaatcagagcagaactgaaggaaatagagacacaaaaaaacccttcaaaaaattaatgaatccaggagctggtttttttgaaagcatcaacaaaattgatagaccgctagcaagactaataaagaagaaaagagagaagaatcaaatagacgcaataaaaaatgataaaggggatatcaccaccgatcccacagaaatacaaactaccatcagagaatactacaaacacctctacgcaaataaactagaaaatctagaagaaatggataaattccacgacacatatatcctcccaagactaaaccaggaagaagttgaatctctgaataggctctaaaattgtggcaataatcaatagcttaccaaccaaaaagagtccaggaccagacggattcacagcctaattctaccagaggcacaaggaggaactggtaccattccttctgaaactattccaatcaatagagaaagagggaatcctccctaactcattttatgaggccagcatcatcctgataccaaagccaggcagagacacaaccaaaaaagagaattttagaccaatatccttgaacattgatgcaaaaatcctcaataaaatactggcaaaccaaatccagcagcacatcaaaaagcttatccaccatgatcaagtgggcttcatccctgggatgcaaggctggttccatatatgcaaatcaataaatgtaatccagcatataaaca

SEQ ID NO: 1100 - DNA, 5446 bp, Homo sapiens
cagttgatcactctgaagctttttggctaaagcgtttgggtttagagcttccattactcatccgccttgcccaaggcctcagcaaccgacgttcgaaagccaggagaaaaggcgaatgataaagggcgctccacgcatgcgttaagaagccgccccaactcccccgcggcgttctttcttggaacaaaactagcgcggagccacggaactccgcagtttgcgtagacttgaatttcctattcctcggacgatccatgtggaatccaggaaaaatagaaatgaaggtacatatgcacacaaaattttgcctcatttgtttgctgacatttatttttcatcattgcaaccattgccatgaagaacatgaccatggccctgaagcgcttcacagacagcatcgtggaatgacagaattggagccaagcaaattttcaaagcaagctgctgaaaatgaaaaaaaatactatattgaaaaactttttgagcgttatggtgaaaatggaagattatccttttttggtttggagaaacttttaacaaacttgggccttggagagagaaaagtagttgagattaatcatgaggatcttggccacgatcatgtttctcatttagatattttggcagttcaagagggaaagcattttcactcacataaccaccagcattcccataatcatttaaattcagaaaatcaaactgtgaccagtgtatccacaaaaagaaaccataaatgtgatccagagaaagagacagttgaagtgtctgtaaaatctgatgataaacatatgcatgaccataatcaccgcctacgtcatcaccatcgtttgcatcatcatcttgatcataacaacactcaccattttcataatgattccattactcccagtgagcgtggggagcctagcaatgaaccttcaacagagaccaataaaacccaggaacaatctgatgttaaactaccgaaaggaaagaggaagaaaaaagggaggaaaagtaatgaaaattctgaggttattacaccaggttttccccctaaccatgatcagggtgaacagtatgagcataatcgggtccacaaacctgatcgtgtacataacccaggtcattctcatgtacatcttccagaacgtaatggtcatgatcctggtcgtggacaccaagatcttgatcctgataatgaaggtgaacttcgacatactagaaagagagaagcaccacatgttaaaaataatgcaataatttctttgagaaaagatctaaatgaagatgaccatcatcatgaatgtttgaacgtcactcagttattaaaatactatggtcatggtgccaactctcccatctcaactgatttatttacatacctttgccctgcattgttatatcaaatcgacagcagactttgtattgagcattttgacaaacttttagttgaagatataaataaggataaaaacctggttcctgaagatgaggcaaatataggggcatcagcctggatttgtggtatcatttctatcactgtcattagcctgctttccttgctaggcgtgatcttggttcctatcattaaccaaggatgcttcaaattccttcttacattccttgttgcattagctgtaggaacaatgagtggagacgcccttcttcatctactgccccattctcagggtggacatgatcacagtcaccaacatgcacatgggcatggacattctcatggacatgaatctaacaagtttttggaagaatatgatgctgtattgaaaggacttgttgctctaggaggcatttacttgctatttatcattgaacactgcattagaatgtttaagcactacaaacaacaaagaggaaaacagaaatggtttatgaaacagaacacagaagaatcaactattggaagaaagctttcagatcacaagttaaacaatacaccagattctgactggcttcaactcaagcctcttgccggaactgatgactcggttgtttctgaagatcgacttaatgaaactgaactgacagatttagaaggccaacaagaatcccctcctaaaaattacctttgtatagaagaggagaaaatcatagaccattctcacagtgatggattacataccattcatgagcatgatctccatgctgctgcacataaccaccacggcgagaacaaaactgtgctgaggaagcataatcaccagtggcaccacaagcattctcatcattcccatggcccctgtcattctggatccgatctgaaagaaacaggaatagctaatatagcctggatggtgatcatgggggatggcatccacaacttcagtgatgggctcgcaattggtgcagctttcagtgctggattgacaggaggaatcagtacttctatagccgtcttctgtcatgaactgccacatgaattaggagattttgcagttcttcttaaagcaggcatgactgtaaagcaagcaattgtatacaacctcctctctgccatgatggcttacataggcatgctcataggcacagctgttggtcagtatgccaataacatcacactttggatctttgcagtcactgcaggcatgttcctctatgtagccttggtggatatgcttccagaaatgttgcatggtgatggtgacaatgaagaacatggcttttgtcctgtggggcaattcatccttcagaatttaggattgctctttggatttgccattatgctggtgattgccctctatgaagataaaattgtgtttgacatccagttttgacctttcccagtaatcactgttgattacgagaatgttaccatgcagctttgcatctgttccttgtactgtatgcacattgctcaaaggaaagtcagtggcttgcactacttacaagtttcatagatttgagcctaaccacaagaggctggtgcttagtactgttttccctgcacgtaggggtcttttaaaaatataaagcttgtgataaagagaggagaatatgggactccatgaaccagtgttgatatgtttgattaagacttttcacaaaataatcatataaaacactagtctctttattagtagaaacttctgtggctatgcagaaatagagatcgaaccaaaaaaaatcatttaaactttaaaaatattttaaatggactttggggagacattttttgtgtgttttaagaatgaattgtagtgctctttaattcagctacatatattcatgtggtgatagggatcaacttgacacaactttgaaactgcataaagtagacataggaactagaggaaagctcaggctgcattagagtatgaatttagcattgggaaaagcccttattcttgaatctagagttactatttttgtatatatttgcatagtgtttaaacctgcagcctaaactactgaaatttgtgattgtatgtttgtgtgagcttcagtttaatgaaagattcataatggttctttgtattattataatacttggtgttggggtgttctttctgttttgttttttactttaattttgttttgatttttttttttttttttggcgggggtaggtgagggtttggagcatgtggtctttttaaaaaattgtaaccctctagaaaatatcaaagaaatgaaccagacgtggtttaaatagttgattttcctattttaacagtaccaactagttaattgggaaatgtaagttctgaatgttcacattgctttaccagtttggcactggaaccaagagcacatgtcgtggctggctacaaggttgtaaagcagaaaatcgaagtttaccatgtctgtaatgtgtacatgaagtgtcaatttagaacagttactaggataaactccattattgccatggctgtcatggtacccaagtgacttggaagatgcatttaaattactcagctgaaatcacttgatcatcttgtgccaagatatgctgttggtgcctgatagggattagtcttttaggtgccctgttctcctaccataattgtgaatgatttgtgagaagtgcaagccatgtttatcctgaatttttacttaataatttgtattactagtcatatgcatgtagctttctgtttacatcctatgccacatggtcttcatttatgccaggtaaactgtatttgaactatgtgcagctagctttgttttaatctgcttggcaaccagtgtagctgctgtaacaatctatcttattgttcaaatatataagagccaaactcttttccattccatctaaaatgttttcatttagtactcttctttcctcctactctatgaacttcaaaacaaaaacaaaactttgagagcagcacatgcatccaggtatttatagattattgccagtgtcttttctgtatgctataagcaagggagcttaggtgttatttctttaatttatgcttgaatctgaaaaattatttctgacttactccatggcctccttataataagtagaagttttatatataattaattttcagcattgggcactgaattaggacagtcctcatctcattgcttggcccttcaagcaacctagctaaaaggtgctgatattttatttagtactgccaacttcaagtgatttagatatctatctatctatctagatttctgaaccaagatatatttatagttcacttttgggtttttatacccacggtaggattctgcattccagcattaaatctgcttcattttagaacctttataaaagcaatagctggaatatactcccagttttaaaataaataaatgcctgattgatttaaagcaagtaggttatgctgaagtatataaagaagttttatattctctcaaaaatggtattatctttctttatttgctagattcttacaaatcttttaagagggctgtaacagttgctgctagtattagggttccacatcattctaatgtatagtttcaagtcttaatagacaatctgaattccactacatttcttttggctccaacattccttttagcttgaccagtctaatttaaaatgtgtttgttggaggtcattaacgttacttgtacaatgctgtcactgtgtgacatccatatgaattttggtatatatcaatcaatcaatcaatcacattgcattcaatcaatcagctgtgattgattgattatgcttagaaatactatagtaactagatgcagtgtgaattttttccattaacaaacaaacaagtcagtggcttaaatgtgattatggtcctgcaaggtgattcttgctaaaatatctaaacttttgttttgttttaactgaatcattttttaacttaaaaagctggaaaatatcaaatgctgttttttttttttcattgtcaacagtggtgtgtcattttatgtatgttcctaatgcttatggaactcctccaaaataaagttactcaaagagagcaaatatgcc

SEQ ID NO: 1101 - protein, 883 aa, Homo sapiens
RALHACVKKPPQLPRGVLSWNKTSAEPRNSAVCVDLNFLFLGRSMWNPGKIEMKVHMHTKFCLICLLTFIFHHCNHCHEEHDHGPEALHRQHRGMTELEPSKFSKQAAENEKKYYIEKLFERYGENGRLSFFGLEKLLTNLGLGERKVVEINHEDLGHDHVSHLDILAVQEGKHFHSHNHQHSHNHLNSENQTVTSVSTKRNHKCDPEKETVEVSVKSDDKHMHDHNHRLRHHHRLHHHLDHNNTHHFHNDSITPSERGEPSNEPSTETNKTQEQSDVKLPKGKRKKKGRKSNENSEVITPGFPPNHDQGEQYEHNRVHKPDRVHNPGHSHVHLPERNGHDPGRGHQDLDPDNEGELRHTRKREAPHVKNNAIISLRKDLNEDDHHHECLNVTQLLKYYGHGANSPISTDLFTYLCPALLYQIDSRLCIEHFDKLLVEDINKDKNLVPEDEANIGASAWICGIISITVISLLSLLGVILVPIINQGCFKFLLTFLVALAVGTMSGDALLHLLPHSQGGHDHSHQHAHGHGHSHGHESNKFLEEYDAVLKGLVALGGIYLLFIIEHCIRMFKHYKQQRGKQKWFMKQNTEESTIGRKLSDHKLNNTPDSDWLQLKPLAGTDDSVVSEDRLNETELTDLEGQQESPPKNYLCIEEEKIIDHSHSDGLHTIHEHDLHAAAHNHHGENKTVLRKHNHQWHHKHSHHSHGPCHSGSDLKETGIANIAWMVIMGDGIHNFSDGLAIGAAFSAGLTGGISTSIAVFCHELPHELGDFAVLLKAGMTVKQAIVYNLLSAMMAYIGMLIGTAVGQYANNITLWIFAVTAGMFLYVALVDMLPEMLHGDGDNEEHGFCPVGQFILQNLGLLFGFAIMLVIALYEDKIVFDIQF

SEQ ID NO: 1102 - DNA, 24715 bp, Mus musculus
  misc_feature (1)...(24715): n = A,T,C or G
ttgtagaggacccaggttcagtacccagcacctacatggtggctcacaaccacctgtaattctagttccaggggcctttaatatgaccctgttctggactctttggattcctgtaacacacacacacacatgtttttaaaagtccattataggggctagagagatggctatgctcttccagaggtcctgagttcaattcccagcaaccacatggtgactcacaaccatctgtaatgagatctgatgccatctcttctggtgcgtctgaagacagcaacagtgtactcatatacatgaaatgaataaataaaatctaagaaaaaagtttaaaacaaatttttaaaaatgtctatgtgtgatggatgcttgtcaccaacagctttagcctctaacaggctgtagaaggttcttccagatgagatattgtcttaatttcatttctgtcgatgtagaaaatatcctgctgagaagcagcttgggggagaaatggtttattttctcttagcgctccaggttccagtctattacttcagggaactcacagcagctggagtgtgaagcagctgcccacatgaccaccagccacaaccacgggcaagagcaagccatgcaagctagcattcttactcagcttttcttacacagtccagaccccaaaccagggaaggggctgcccatactcaggatggatcttcctactcatcagtcaatgtaatcaaggcagtcccctatagatactaccacaggccagtctgagctaggcaatccctcagtgaggctttctttccaggtgactctaggctatgtcttagatccagcgggatagacggggtaaatgaccatcacagtcagcctgtctcaggtccagtgggatggacagggggtaaatgaccatcacagtcagcctgtctcaggtccagtgggatggacgggggtaaatgaccatcacagacagcctgtctcagatccagtgggatggacagggggtaaatgaccatcacagtcagcctgtctcaggtccagtgggatggacgggggtaaatgaccatcacagacagcctgtctcaggttcagtgggatggacagggggtaaatgaccatcacagtcagcctgtctcaggtccagtgggatggacgggggtaaatgactactgcacagagcctgtctcaggggtaaaggtcctttgcaccaagcctaacagtttgattttgatccctggaattcacatggtgtgaggagagaactggctcctcccacaaggagtcaccaaaccacagtggcactgtggcaaatccatgcctctctcccaaataaataaatataatgtaaacaaacaagcaatcaaaaatccaaccaacaaacacaaacccctggcagagactatttgactcctgtcatctactcgtggctaagcccgacttccacagacgcctctcacccagctcaagcgcaggcagggccaataagctctttcaacatctcctaagaatgatcccttacacagacttcgtgctgcacagctttatgaatgcggcagaaacccagctttctttgcttataggtatgttcctagtgagtttagctgaaggatccgataagagaggcatagaaaaattaaacgagcaagcccagtggtctataaaaagttgaagacatgtttgagtaaacggcagcattcaggtggattcttgccctgaaccgtcctcgagaaccataacgactttagcaactaaagctcccttcttacctgtgctgcctggttttatgttaacacagctagagtcatcagagaggagggagcctcagtaaaatgtctctctaagaacaggctatagactgccttgtaggccttttattttgcttttacttttttgagacagggtctcactatgtgctccagatgtcctggagcttgccatatagaccaggctagccttgaactcaaagatctacctgcctctgcctcccaggtgttggaaggaatgttttgtgccactacactaggatggaaggagattagtgattaatgagagagagtatagcccattgtgggtgaggccatccctgagctactggacctgggctctataagaaagcaggctgagcaagccatggggagcaagccagtaagcagcatcctccgtggcctctgcatcagctctgcctccaggttcctgccctgctgagttcctgccctcgctgctgttgatgatgcactgttctatggaagctgagtgaaataaacccttcctctccaagttgcctttggtcacggtgtctcacaacagcaatagtaacccaaactaagtcctgactcaagggacaagaatattctcatggataagttaggtaacaccgtgagccaggtgctctggcgtgtggggcaggatttgttgtttttgatcacgatgagatctgagtgcactgtcgctctcttcagacagaccagatccgggtgcaccggatcccattacagatggttgtgagccaccatgtggttgctgggaattgaactcaggaccttggggagggcagtcagtgctcttaactgttgaaccgtctctcctgtcctgtgatgagattttaaataaaatagaattcttgggtggaaatagctgggttgacaaagtgcttgccatgtagatgtgaggacatgagtttgatggtcagaagtcatgtaacaatcaggccacagagcacatacgtgtaattccagtgctgcgaagcagaacaggtcggtcctagggcttgtgggccagttagtacagagactctagttgaactctgttgaaacgagaggacactctgatcaaaagcaacttcaggaagaaaggggttggtttacagtccagagggacagagtctatcagtgtagaggaaggctgcgggagggaggggcagcctggtagtcagggattagagagatcacctttcatccccacacaggaaacagagtaagagaagttagtgggacgaggtacacaacttcaaggcccactcccaggggcatacttcctccagcagggctctaccacctcatgggtttctaaacgtcacagacagcgccacctgctggcgacagtgctcaaaagcaggaacccatgagggaactttcatagtcaaatcagaacatcgcctgggtcatagagttccaggttctgtaagagatggtagctcaaggaaacaggctggacagccctgcaaaccaatcctggaacttgccctttgaactcactacccccaggagaattaccactggcgtagtccactctggctgctgggcctttctcgcaggcctgcaggctaaagtccgaggtgctgcaggttggtccttctaaggtatcctctgcttgcagatgggtcttcccaggtgtgcccttatgatggtatctttgtctgtctctccatgcttcctgcaaggatactatccgccattttagttcggggcacacattaaaggcctcactttggtttagttgcttcttcaaagactgtctgcaaatacatcctcattctgagattctaggtcttagagctttaacagataggctttagataatacatctcagcccacccctcccatcccactgcgttacagacagggactagtaaaagtcacgaaccagggctggagagaagtctcagggggtaaagtgggtgacatacaaacacgagggtctgagcatggatctccagcatccgtgcaaaagccaggtgtggtggtgcacatctgtaatcccagtgttggggacaggaggagacaagctgggattcagtggtcagagagtctaaccaaatcaatgagctccaggctcagttagagaccgctgcaaaaatgaggtgcagaataactgagggctatacccaacattgacctctgtcctccagctgatgcaaacacatgggcacacacctatatgaatgtgctcgtgtgcacactcacgtgtacacacacacacactcatcatgaaagaaaatcatgcaggtggctgatcagagcatcctgagagcatccacgtgtggtatggctgtgttgtgattcttcacttccgttcagctccacaactggcgctcagtatcctttaatatcaataataggacaatgcactggcgaagccgtgccggcaccagagaggtgacatttgagtcactgggtaatgtgatgaatcaaatcaataactagagcggatgtttactgtacgtcacccttcctgtccccatcacgcgggtgtgtgacacatcagtgctggattgtacccagacgcggaacaacgttcctttggcagctttgtgaggtggccttctgggtcacaaggatagttagagacacctctcctggaagaacaataccccaaataaaagcatcggcctgcacacgttgcctgcagcaccctggggtggcacagggttctgggggctcgactagtgtttacagcatgtgaactaggctctgtggaacagagctctgactgtgcactgtggctatctgctcctgtgtgcttgcctcttcacgatgggatggacagagctacatggcctaatgcacaaagttgcttctgggcactctgcagtgggggtggggggggctgggtccaggtcctacctttaaaagagattagtacacacctttcaatatggtcaaggtcataccaaagacaacaaagcaaccaagagcctgcctggcctgagccagcatctgtgacgtgagaagcagggacacctgcatagctccgcgcctcattcctcggctccagaggtttgttctggctgctgttgactgtcccatccttcagatccgcatattgaggcctgaggggtctcacacggacaagccttccctgtcttggaggctggataaccacgtccgaagtgccagtgcattcagtcctggtagagctcgtgccctgattggtggacagtggacgtctttaactgtttttacatgcccagaattctcaggcttttcccttttataatggcatcgatcacactttgagggtcccactcccctggtctgacctcactttgcttttctcctgtggcccccatcacactggagattagagtttcagcagacaatcatgcagggtgtgcatgcccagagccttgggactcctgcatgtcgatgccaaaactgtccggcttaggaagcaagcttgaacacggccatccgtctgtctcactcacacaggatgatggggacgtgggcattctgatggactgaggaagacaggctggggctcaagggttaacggtggagctgggcgtccctgagaatgtcttcatcaacttggttccatcacgtctgtgcctgcctggcacccagacctgagcccttgtgtgaaatctcagtaagaggaggcaggaagcgggtggaaacagaaaggagggcaccgggacagggaggagagcaaaatgtcatgatacaagtgtgggaagatgccacgatgaaacacgttattctgagtatagaacccaagattcagaacttctgattttatccgtggtctgcctcaaaaagccctctgagttgtccaggttaaggctgctgcggatgataaggggagagaggtccagtagtgagcctgggctaagccccaagtggacagtgaggtcacctcctcagtgagggcagctacaggctttcaacagctaatgccaggataatgaactagtgacaggctactaactgaatcaaattggcgggatgggggagtctccgacgctgttctattactgtgaggagacaccatgaccaagacagcttatgaaaggaagcatttaactgggggcggggtgggggctgcttagtttcagagggttagttcatgaccatcatggcaggaagaagcatggttgagcagtagctgagagctcatgtatgatctataaagatcatacatgagagagagagagagaatgaatatatgtgtgggtctggcataggcttctgaaacctgcaagcaagctcccctgtggcacccctccttcatgaaagccacacctctaaaaaggccaccccttccaatccttcctaaacagttccacttagtggggactaaccattcgaatacatgatgagcctatgaggccactctcattcaaaccaccatggggtgtgatagatgaccaggtaggacacttacagaacccaagcactgggctaagggatctggcattaatggtgctaaggcacctactgtgtgtgaggagtggccagggacttgggacaactcacattcttgtggatcataaccccaataagcaagacacattgtgatggtttgtatatgcttgacttaaggagtggcactattagaaggtgtggccctgttggagtaggtgtggcactgtgggtgtgggctttaagaccctcatcctagctgcctggaagccagtcgaatgctagcagccttcagatgaagatggagacctctcagctcctcctgcaccatgcctgcctggatgctgccatgttcctgccttgatgataatggactgaacctatgaacctgtaagcctgtcccaattaaatgttgtccttataagagttgtcttggtcatggtgtctgttcacagcagtaaaaccctaacaaagacacacattaacaaaacagggcatgggatatcaacatgacatacttagtgtgtaaggaaagagggtgaagatactcgggtaggagatgccggcttgcaaattgaagtttgcccattatgagtgcagaattggggctgaagtgaggcctctgtgggtaaaatgcttacaagacaagcatgagggcctgagttcatagtcccctgaaaaaagacaggagcagttgtcacacctgtcatcctaatggtgggaacagaggcaggaggatccctgcagtatgctgtccaggctgtctagctcattgatgtgctctttgagaatatgtggaaatgctgtggggaagacatctgacattttcccttggccttgctgtgttcttccagggacttacgtatgaatatacatgcatgnnnnnnnnnnnnnnnnnnnngatcttctaacctcagaaggattgctggccttacaacaagtggaaagagctattgaagaacaatttgttacttatatagattactctttgcctttacatctgttaatttttaataccattcatatgcctacaggattgttgtggcaaagggctcctctagtgtggatacatttgaggatatctcctaaatgtccccccccccccccccccgcctccagagagagaaggagtggagggagggagggaggggagcagggagagagggagggaggacgagaaatacaggctgcagttttaaatgaagttgatcgactaaagtaggggaatgagttagctatgtgggggagagcatttcgggtagagggaatagccagcaacccagatacctgaaatccaatcctacaacgattattaacttagttgttacacattaaaatcccctttgtgtgccagtaacctagggtttcactttggttttgtgacagggtcttgtagggcaggctagctccaaacttgagattttcctgctcccatctcccaagtgctgggcttgcaggtgtgctccaccacatctggatccctttgttttaagaaagagttccgcagctagctaaagataggatacctttcacgggcgtcgcagcataggtgtgaagccacaactcttgtgctacagcttgaactctccctggacaaattcgaacaagcatctgtttccgccaaccacagacaaaaggtgtgactccacctaagttcaacctggtcaaccaggttcctcattgggcttacagagcatgtgtaagggatgaagatgaagatggagacctctcagctcctcctgaaccatgcctgcctggatgctgccatgttcctgcctcgatgataatggactgaaatgggagcacgggtcaccccaaatcagctgcatcaaagaagagagactcacccggggtatagatggagtcctccattctgtcaccctccacacttaagcgccttctgaaaccatgcacagctgtgcacagtgacatccagctggcgggggagggggagggctaggcacaggaggagtggctggaatctcaggtgaggtcagatgacctttctcaggcccctccccttctgtgaggcctaatctggaacagggatctctggtgagatggctgctgtgctcagagggcagtgtatgaagcagtaatgctctatacaccctcacacaccacctgtggggggatggttgaagcctcagagcctttctgggacaaggtgacattgtcattgacagcctattgaggagagatgctgatttccattgaggcccacgccttccatcctaacttaattaggccaggcagtaaaaccttcactaataactgtcaggacccctgagtcaccagggaatgacaaagcttggcaagcaacctctgtgggaagggaaagtgtgacttcactgctgtctccctctacaaccgtcctcggggggtcaccaaagacccctcaattggtcagcttgctccataccaaacctgttggcagaccacgaatgacttatacacacgtctgcacagaacgcgtccatgcaaacattccatcaccgatttctagtttttgtttcatttttactttttaaagacagctctggctgtcctagaactcactctgtagatcaggctggccttgaactcagagatctacctgcctctgcctccagagttctgggattcaaggtgtgcaccatcacttggccccagcatagacttttaaaaagatgtatagactttgatccctctgctccatctcccaagtgttggggttgctgggctgcatcaccctacctgtttatatggtactgaagcctgagcccaggtcctcacagaagccccaccccaccccacccccagctgagctgcatcctaggccaatagtagagcattttgggaaaagaaaaacagtctctttaccccaagcccactacttccagcttcgtaatattccataccaatcctatatgacacatcttggggtgacccttttgttgctattctttgtagttattgtcatctactaatttataggcttggctggggccttaagtttaacactgagagcctgtaggttaagtgaagactcatggatgtatcccaggctacccttaaattcagaaacctcttgcctggggcatgtttggccatagttgtcagttacttcatgcacatactcttgaaaacttgtgtgtgcacacatacaaacgtaccacatgtacactcatgtgcgtgcatgcacgtgcacgcacacacacacacacacacacatacacacaatgttctgagatgagtaggctgctaacagaaccactttgctgggttgagtctagtgaagccggctggccaggccgcctggggatgtctatcagtcctccttgctgggtactatccagccctaaggaaaccttactctgaggaccgagtgcttgtgatcttacatgcagccaagcacatgtgctggatctgagctttgagcaatgcttgctgtgtctttgctattttgaacaactggtttaatacaacctgacaactcatctatttactggtgaaggattttttggaaaaagaagccgagatatttcacgtcataccccgcatcgcttctgctaacattcataaatccttgtccttctgccttggccacatcatgtctgtccccatctttcacctgtgatttattgctgagtgacttattttgccagatttataaacttcatgatgctctgaatacccactctgaacaccagtcaacaagccagtaaatttattgtctatgaattgttactctgaaaaattacatcaatgcaaagtgattgcctttcagcctccctagccaataaattcattctaatttttttggaggggacgtatgaggtcacaggatgatagataaaacgggcaatccctcaatgaggagtgtcggaagttctccagagcagacgcccagacggacttctcgccgcatcatggacagggtgcccttctgctgcctgctcttcataggacttctgaatccactgctgtcccttcccgtcacggacactggtgagaggactcttcagcttccaggtgaggtgactttttgttttttgtttttttttttcagttctgggtgccactcaggggcaggaggaggaggaggaggaggaagaggaggaggctggctgaaaagggtcctctgtaggagcaaccatgctttgaaaagaggctctgagggatccttactgcaggtcttagctttagcgatgggcatggtcttctctaaacaaagtgcgtatttcatgtaacaaatgtacttccgaactttccttgtcacttttgttcataaaaattggacagacttaaaacattaccttgggttttggagtgaaatggttgaatacaggagtagtgttttccaacgacagagagtagtgtactctgttgtgagttagaaagcacgcctctgcgtgtgctatatgcaacgaaaaggcttaattaagcagagcggcggctgaagctggggaccaaagaggcatccaagtttgctttccttttgacttaatgttctattcaggttcagctgaaaggggacaaaattagaaattttaccacagcctctcagtctggtatcaggttgtgtattagagtccataaaaaatttgttaactgggtttaatatttgattttagatacctaagcaaaatttcctttatgtttattgtgtatgcacacacacgtaccagggcccagatgtggaggtcagaggatcctctggttctccagcacgtgggcaggcttggcggcaggcaacctctgctaagctagttcactggcgtggctcttgggtcctttcagaccttttcctcagcaagttctcttcctgccactgccactggaccgtccagcctccgccagcattctgagcatctcagagcatcactcacgttctgtccatcggctgctggggtcactgagttcacactggcacggaacctgatgctcaagaccaggcatgagccaatgctcttactttaaaagagcggtgcaccctgctcttcctctctaaatcagagaccaggagcgtcagatactgatgccacgttaaacagctacgagggaagggcttaggagagggcaggcgcctttagtgtctctccactgtctttcatcaaggttgcagatgagtatttgtccctctgcagcattccagggtcttgtgtggctttccagccagactccctgagcatctcaacatgctggcacctgcccaaggcacatgtcccactgccagccgccactggtcgcacacaccgtgcactctgtacatttacacctgttatcatgaagaccacgcctcacacacacttgtcatacacgctgcctgcccttatacttcacatcacacacagtgcacacagcttgcacatagcatatacccacatatattcaccttgtataccacacttgcatttaccacacttccctccgcatacacacttcacatcacctttcacacacaagtcacaacgcagcgtttgagcttcccgagaatgtccactgtgaggtgaaatagaggtgccacagtcaacttcactatgggaacacaaatcaagaggcaataggtcacagtagatacacagaaatgaggatcagtcagacttctggctcctgcccaaggcaggtgctagggtgaccacatcggcagggaggggtggcccatgggttcctccatggactcctgatgactggcatagcactttatatctgctaagtgccaccgtggcatgtcaccagttctcacctctctgtccccggcactcatcgacgatgggaaacagaacagccaagtgaagcccaggttaggctacttgtctgtctgtaccccacagtgcttgaggaagacgctcttcgggctctggaggagctggagaggatggccctcctgcagaccctgcgtcagaccatgggcacggaagcaggggagagccctggagaagcaggtaaagcactcttggggttgtgggcggatcccagagctactagagagagctcgaaaagctgaactgtataaaccttcttagtctatgcttttaccaaactctgtgtacccttctgagacctgaggctagcctgggctacataacgagactatattaaaaacaacaacagcagcaatgaggaaacgtcctttttgggttgactttcaagtaaaatgtaaacagggtaaaatgacgaatgacagacatggggactcacacctgtgaactgggagtctgaggctagcccgaggtcctactgcaacacaaacaactgataggaaagaccacagctttgactattttcttctgttgctcagaacacgtgggtagaggacgaagagtctttcagtagacattgcttactgacagtactgtcagtccagctatagtttagaatccttgactgctctcaagtacacactgcctcagtctggaaaggactggaaatgagacacgatttaggggtgttccacttgtcttttcttcttcgcacatgcagtgtgcctgcatgaggtgggctcatgtgggggtgtgggaggcccaaaagtgacactggctatttttctccagctctctccaacttatttatggaggctgggtctctgggcctggagcgccttaatccagctgtttacctagcccagggatcctgtctctatgatctgagtgcttaaggggccaaggtggcctctatgcccccccagcttttacctgggttctggggatctcaactttggtccttcagcctgtgcaccacgagtcatctcccagccttgggatcccagattctgtatgttttgcaataagcataactggcgggtgtggtggcaaatggcacaggtggttttctgggaggccagcctggtctatatagtgagtccctgcttaaacaaggaaaaaggaagagaaaacacagcggcagatctaatgagaaggtgtcaaactgttttccaggtcccagcactgagactcccactccacggggaagcatgaggaaggtaagacgctctggcctttgagagagagaaacggaacttctcataattcacgacccaagagtgttctaaggaatcacaccgtaaaataattggccagtgttcttatgaggcagaatttttctaaaattcacagaatttgtaactgtaacaagaatgtaacagatgcctactctgggtaaattgtaacaagaatgtaacaagcgcctgttctgggtatactgcagtaggatgcaagagaaaggagcagcaggtcaggctgctgccaggcttgccatccactgtcttgccacatggccccattggcagtgccatccctaggaagctggtaagaaatgctcagactccacccctccctgctagtcacacctgcaattcaacagctctgcaggggaccagtgatagattagtcagcttggggcacccaccaggcagcgtgggaagggtcgaaggatgctgtgctcgcctccccaggatgaaaagggttgcaaaggctggaccagagacacctctgtggctggaatcgccactggcatcctggtagccatcactgtgacaggggatcctagagacagggagcactacctgaagccctgaggggactaagtgtggcttccgtgtgcagctgggggaaagtcatcactcagaggtttacatccttctgaacagtaggacagtctcaggcggggttactactgctgtgacgaaacaccaggaccaaagcaaccgggcaggaaaggatttatttggcttacacttccacatcactgctcatcactgaaggaagtcagagcaggactcacacagggcaaggacccggaggcaggagctgatacagagaccatggaggggtctgcttactggcttgcttcccatggtttgctcaccctgttttcttatacaacccaggaccaccatcccagggacagtaccatccacaatgggctgtgccctccccatcaattgctaagaaaatgccctagaggcttgcctgcagacagatcttatgggagcattttctcagttgaggctccttcctgactggtgactctagtttgtgtcgttgacagaaaactatccagtacaaggattatccctagggtctcaaactgtaaatggaggacgtgcctactgtattctagaatcacaagaaaatatggatcaacctttaaaacaagccaattttgacagctaggatctatgttacacagaaggcaagtgtctagaaccccaacagaagcctggcacagagaggttaggggagctcaaggcaaccgcagagttaagctgactggacgagagctccagagacccagcccgaggagtccccagaaaggactctgactcggggctgtttatctattgttctggtcttgtggtttcaggctttcgctgggcaaaattctaacactgtactgagtcgtctcttggcaagaaccaggaaacaacataagcaacacggggctgccccagagtgcttctggaaatactgcatttgaggagacacaagcgcccgttggtctctcagaaccattgcttcaggaaacgggcagagcagatgcttgaagcaaaatcacgctaacgacgccttgttcttcattatgagaaataaatcctctatgtttctcaagttatcgcacacagtttagtttactttgcgtatacaccctgaaaaatcgacagcccacctttgcccccatttatcttggaaatgtacgagttgggctggaggtagctcggcggcagagagcctgcctagctatatgaactctgaactctgctccatcctgggctttgcaaaaagggggagaaaaccacttaagtaaagagcacacagctcagaggaggaagaaaaggcataaagtcagaaattatttaaaaataaattactttcttgacattttctcaagccctaaaaggtgaatatgtacattgctttggggtgtgattggagagataggacctcatgtatccagcaccagccctgaactcctgattctcctgccccactacttcctgagtgctgggtgtgcaagtggatgtcaccgtatccagtgccggttggtggtgcagaggctggaacgcagagcttcgctcgctcctgaggcaagcattcgctagtttgaaaagctctaatgtaaaggcagtggcgggcggggcctggggatgctctgaactgtttcttgggggcaagcttgtgtgttcacacccttgctctcagcaggctcaagcacttgaaaacttccctgctctcaacctctgtgagcgagcttcagtgtccagatgactcgctttgagtgctggaaactcacttcccttcagctaacaaaggcaaaatacttagtgttcttagagctgacaccaggattcaggctgtggaatgggatcggcgggttattcatctttaaggcccacaaatacccaagtagaccagcatttcatgcacaactgtggcagtctgtagatgaccagacactttgtctgggtgccacaggccgtgactgaccacagagccacaggctggaagcactaagtctctcacagaagcaacgttcctgtatgagaaagtttgcaggtgagcatcaggtctgtgccaaccatgaggcactgtgtaaacctcactctcccttgtccccaaacatcaccagtgccttcaagtaactgtgacaaagatgttctaatttagacacgacagcaacagctcagtagggaaagcaggtgtgcagattcaagcattcagctgtcagatctgcctatgaggctcgtggctccttagtgtcagaatcaaactagctctctctcccttttggcaatcccaagaagcctaaatgggtttctagtgtactagcataatctacaaaaccgtcactaggcgtaatgatttggggcgattatcttaggacagactgctaagcccagtcactggagctgagtcctctgtcgactctgcagcctccacgggctcttgtgaggctgggacgagagactttctatagagtacttacactggaggcagaaactgtaaatcctgggctctgtggccctaggtgctggcatgagaggaaggcaccactgggcaggcctgagacttgctggctgggatcaggctccagattctgatgtctgactttgctccaagtcactcagagtttgtgaaacacaaggccggccgtcctacagaagcttcagggtaattttgataattccgcttcactggcataaatgatagcattatccatatgcttacaggtatagacatccagggctcagtaaactctcagggctagaatggagactgaacacagtggcagatgcctgtcctccagagtgggaacagagacgagcttacacggcaaacagttgtgagtgtggtgatgtggacccagcacggggccttcagggaccgcagcaagcaagtgtctctggctgacaccaagtgtgctcaaggctcgattacacaatgaagagcattctccacttgaacacatatactgtttattgtttttactcaaaaagatacccaatgaaaagataaatgtccactaagtacaagcaaattcacagttaattatgaacaaattgccaatttggttaaagtttgccaccttgtgaattataatattttatttaatccatttatttacacatcctattttcataaattttgacctctgacccaagaaaataaagctttggggggaatatttatgtagacattcaagtctacaacacacacttttcttaccaattctctagttattaatacacaagtcagtgagcttgagtttccactgggtatgacccccatggggggcagcaggctctgctggaccagcccacagcagcagagattgccggtgtactgatggcatcctagcagaggtgagacgtggtaaaggactttacagacctgactacagcaccattttcaaatcaagcctggcataatacagactccataaggtgtggacaaaggcaaggaaataaggaactgcagagaaaacggggatccagaaccagcaggaaccagagaccatcaggtctgctgtatgtacagaaacgcagaaggatcctggtagcttcgctagagaaggccaacctgacaaacgcaggcctcccaaatcacttcactaccaggatggactaggttctgagaagtctctctgttcacacagcaggaacacgtgtcaggaactgctcaataccagaaagctccaagaaatgtcacaggcagcatcttaaaatgtttctgacaccttccaatagaactgcggtccagaaaaagcactattttagaaaagaagtctgagccacagagttgggagcactgggtacagcggcctctatgacagtctcctgaccacaatgacaatacagttatcaatagctataaactgtcagaggagaacaaagtgttcctaaaacaaagcaaaaacaacagccaaaaaaaaaaaaaaaaaaaaaaaagaagaaagaaaaagaaaaagaaaagaaagagaagtaagttggactgcaggaagtgaagcaggaaaaggccactgtaaacctcctccccgtcagttccttcctgacctgcacgggtggctccactgccatctcgagttcaagaaggaactttgggcttctttaaaccagagcaccagacagtgagaggacagacgcgtgaacaatcacactcacttctgaggcagaaactgcctggagagcgtggactcatgggactctgctgtcaccgagctggggtccccgagctcccttaagtgtagtctcccaaactcttacccctcttcaagggcaaacaaaaggcagaccgctggtcgtcatcgtgtcgtttggtgaaaaggaaaggttaactgtttgttttggtgagccggggcacacacatctccatgataacattaacgtaatatttaaaactgttgaaaacactattgtttgggtaagaagctttttgccatgcaaggcttaacttcagtcatccaaggagtaagtcctggctagctgacagatcttaaggaaagagcccctgtgaaaggcagctgccacaggaacttcatggacgagaatggggtcaaacaaccaaagccacgagtcccacagttcctggggaatgatgcgctctgacgctctgagagaaagctggaatgtcttaccatcaggaagagaagcaccatgctgtacaaaacctagatcaatgtggtaagttcacggacaccccgtgagaaacacacaacctacagacagaagttcttcaagtattctagtgggaaagtgatcttgtaacaacataaaaaagcaaacgagacgaaggcctgcgactcgttccaactgtaacttactcagggtgacctctgaaatctgctgtcagacacagcccaatgtcttcaggtgacagatgagttagagaagacgtcttgttgactgttttactatcatgaacaagagccaacgtctgctcatgttttgggaaaaccaagaagggagacctggggagacaggtcagcagtggagagtgccagcctagtggatgtgaggccctgggtttgatccccagcgccaccaaaaccaaaccagaacaaagccagggaagaccttaatgtcaatgactggcgtttcagagttagactgtggtgaggtaacgcacggctctgtgtcccacgtgacctggagggggtgtgacatctttacagctgctcaactggtgtcttctgctgggtgctgttccaggacctctgcagtgtcacccactgaacctctgtcttcacaggcgacacagctctccaaaagagaccaaaggcaagcgtgttatttgacgttaatgccaatcgaagagtttaaaagtaaggaacaggctgagccgagggaagatttactggttggtttttgtaaacgtgacagacacaaacccaggcatgtctgggatgagagaacctcaactgagagactgcctccatcatactggcctgtggtcaggtctgtggtgcagtctcatgactcatgagggatgtgggaaggccccactcactgtgggctgtgtcacctccaggctggtggccctgggtgctataagaaagcagactgagcaagctatggggagcaaaccagtgagctggccctctccacggcctccgcttctgttcctgctctgactttccctgtgaggtgaaacatcccttctgagtgcttctggtgcgtctatcacaaggatagaaagcgaggacagaaagtggagaggaggaatagacgagcaaacataagcatcagtgaactgagaggacacctacagagaaagccaccaaagccttctaaccctgtgaaagacaaaactgagataaagctccctggaggaataaaggcaaggctggaagaagtgagaactaaaatcctgaagaccaggtaacggtatataacggatgcagtggagggaacaaaggaaaagatgtatgtgagaagaaaaagcctgaaaatcttccctatttaatgatgatctgaacatccaaggtcatcttcctgaatgagcatccaagaggctcaacggcctccagacgggatcagctcagacatacacacccagacacatcacaaccactcaaaccaaagcaggagaggacacgccacacacgggattcttagaaaatcatccatagatgtctcagcagaagttctggaggccagaagacagaatgctgatacaatcaaagtgctaaaagggaaaacaaaacaaaacaaaaaaaacctccttccaccaagagtcctttatctgggaaaactccttaaaaagtaagggagacattagacaatccaaaaaaaaaaaaaacaaaggcctggagagtggggcatgatgtcaccctctctgcagtgtaagcagtgctgagggtggcactggagatggcagggtggttaagagcccaggctgcagcagagagctcggttagatttccggcatacacagctctagaggatctggcgccctcttctggcctctgtgggtaccacgcatgcacgaaggtgtgcagacatatgtacaactacacacaactgaacacaaagaggaggaacggatgaagggatactgcagctgggtcagagggatggtaacccaaggctgggtgctgttacagccctggcttgccagtccatgatatgacttaggacactaacacccaagaatgacctgggtttctgtcccagggttctcaatgcaccaacaagcagcaggaaatggataaggagctcctgtggagtgagaaagtttccttcaggatgcgcctttcttatactttggatttaagcttttaaagaggaatgtatatttgaactatgtatctccatacctcccctcagctggtcacaccccagggaagtatctttatcaccctaaccattccaactggtgggagagaactagttcatcatggttgtggaatggtgtttcagacacataaggaaagaactgtggctactcacaagagacttttaagactgggactgctgacattcccttacaaaaaggaggtagggagtcactagaccgtcaccgtagaccgtcactgtagaccctcactgtagactccagcctcttccctacacttacctcccaggtctgcatggtttcacctcaggtgtcctgtgttctcaggaggttctgagggtctagagtgcagaagggactgaagggggtggagatggagcgctccatcggtggaactatcactcatgctggggtgagatggtttcagtaacatggctgtctaggggtcgcctatgctctgtaatgtaagctctattaacttactggtttgccaagacggcctctactttacagtacttggtctggggctgggccctacctggcatgaaccgacatttgtttatgcttctcctcctaggaaactttacacggtaaaacagacctgtattcaaaccccagcacacatgactttacatgtgcacactctgtattcagagcacacaggtaatcgttcagatgaaggacaccaggtgcctggcacgcgacagtcatgatgcgagggagggcatgcttacctggaggtgtccctcctgaggggctgtgtggctgtggatccaggagcgcaccttggccagctcctccctctgcgcgggagagaacaggggctgctgctgttccatgctctggagcttctccaggtcctgcttcagcacctcctctcgacccctaagatcgagaaggcctctgagcgccgcgcgtcccccccagtgccgatgcacttcgtctcttaacttacgacacactcaggttgtctgccacactcacgtggcaaacctttgcttcttggtggaaaaccgtgacgctaaaacgaagcacatcaggaaatgaactttcccggcccccctccgccaggacaaaggcaaacatctcgagtgtgcgcgtcctggaaggacagcacgtgtgcgtgtgtcctggttgtggtgaacagcgtgtttgctctgtatggagctgcacatgtgtggctgcaatttttcctccaagaatcatttgttgcttgaattgagatgaacaaatttgtaagcacatttttttaaatgattgtatctaaaacatttaaaagtcatcttatgccgggcatggtggcgcacacctttaatttcagcactcaggaggcagaggcaggtggatttctgagtttgaggccaggctggtctacagagtgagttccaggacagccagagctatacagagaaaccctgtctcaaaaaaccattaaaaaaaaagtcatcttatgtagaaaaaccacattagaaaccaaaagaacagccagtgtgatggcttgaaagggatggtcacttctaggcaagtgtggctacaggacgctgtcctctatccttacgtacacaccacagctgggaaggcacttgccctcttaccaagcctgagtctgatctctgggacacacatgctagacagcgagaacaggcttccacatgtatgccatggcaacaaaataaatgacagtaatatgaaagttttaggattaaagagataactcatccaaacgctaagtggggtttgcagagtgcttccgtacctctcgggcacctggtatgtcatgagaacacactctggtgtccgctctatcattctccagatggactcttcagccgccccgggaagggcttcgtctctctgtctatcctgtggcctctgtctgttttcagagacttcagaagcatagtcagtgctactgaagtatatactgctggcactgcttcctgccaaagatccacagaatggaaaacacccgtcagacgttcacgtgccagagaggtcctgttccaactttggcacctagctgtccatctcagcagggacagtttaagatgttaaccagatacttaccagatgaccttacaatttcaaatgacttatagcattattgatcacaggcccagaccagagacagtccagtaaccatctatacaatgcaatcccaataactatccatacaatgtaaccctcctgagcaacagaaaggacgactaccaatacacataatgaggatcaaccttaacagcactactctgagagactcttaatgcaagaagctctcatgctgcactacaggaactgaggcggtagaaagcacaccagtggtgtcaggaccgaggtcgactatcagtctgactagaaaacactctcacagcacacgtttaaacacttggtcccctggtgatggcagggtcctgggaagtggtcaaccctttggggcaggatgcctgagaggtgggtgtggggggggggggagataggaatttgaatgttacaacatggccccacttcaggtctgagctgattcttgtctgctatgtctaggtccctccacctaaggctcagatggtctagcctccactccttctcagccgcgatccacacagatccatgagcccaagcaaatcctcctctaaattgcttccagcagatattgtctcagccatgagaaaagcaactcacacagaccgtaaacggttacgggagaactttctagagcagcaggaacagcctaagtgcttgtaacagttacaccaatgtctgttttgtcaaatataacccttcccgaaaggaagcctacaaaaagaaggggggtggggagccccaaacttcctttctatgctggtgtccaagctacaaggccttgggcagagtgatctggtaacggtgaggggctgttttcctggtcacctacctgaggcagcagcagacggacactcctgctgcgctgttgccgtggccagctcaccagaggtgcagtgacggctcctactgccactgggacctgtaacacagtgctggaggggaggacacaagggcacttagcactcccaagagctagctagcaggcagctcttcaactttacctgtcacgtggaatgagattcacatatgtaggtgaggagtggagactcagggctggcgtcaagaatgtgcttaaagtttctttggaactactgtgctctgaccccggctgcatgtcaggcaccacccaagggtgggcttctgtacacctctgtcatctggcaagtggacccggacactttatatgctctaagcatagtgtgtcaaactctaaaaacacagtagcaggcaaaacagagtcccagccctctgagaagacaggctacacagggtgaagcaccacggaaatactgcatccttcagtcctcagcggaagccgtgagagagccatcttcccagctttctcatgaagacacaagccaagatgaacgcaccactgcagtgagcccatctcactagtgacagagctcccatgagaaccaaagtcactgtctctattttctcaagatttatatgactaggtcagcgagatctagtgaaggcacctattaccgacgacctgagtctgatcctcaaaacccatgttataaggagagaaccacctgcccagaattgtcctctgacctctgcgtggacactgtggcacatgagtgcccaccccaacagtaaataaaacgtactttaattagaaatatttattatgtctgtatgtataggtgcatacgtgtttacaggtgcctgaagcagccaggtaagaaccctgggtccttcggagctggagttaaggggtttgcagcacagccgatgccatgctggggtctcctcgggccctcgtgactacacagcaaccactgagcctcttatccagctcctgagctgctgtcttatttcttagcccccaggctttttttttttttttttttttttttttcatccaggctatccaaagtagtgactggggagacagcccatcagttaggagcccttgatgtgcctccagggaccctgggtctgttcctatcacccacacgtggcagcttacgactgtctaaaactccagttccaggggatccggctacctcttctggcatggccccggagcataccacacacacgctggcaaaacactcctacgcataaaacaaaacactaatttttgatttcccactaaaatgcaggaatgccagactctgaggtttaatctgataaatatctcgaagtgcttttataggttaagagtttggaaagttcaagatacttgacctaaaaattttcagttttgaaaatggcttgtat

SEQ ID NO: 1103 - DNA, 538 bp, Mus musculus
ccagagcagacgcccagacggacttctcgccgcatcatggacagggtgcccttctgctgcctgctcttcataggacttctgaatccactgctgtcccttcccgtcacggacactggtgagaggactcttcagcttccagtgcttgaggaagacgctcttcgggctctggaggagctggagaggatggccctcctgcagaccctgcgtcagaccatgggcacggaagcaggggagagccctggagaagcaggtcccagcactgagactcccactccacggggaagcatgaggaaggctttcgctgggcaaaattctaacactgtactgagtcgtctcttggcaagaaccaggaaacaacataagcaacacggggctgccccagagtgcttctggaaatactgcatttgaggagacacaagcgcccgttggtctctcagaaccattgcttcaggaaacgggcagagcagatgcttgaagcaaaatcacgctaacgacgccttgttcttcattatgagaaataaatcctctatgtttctca

SEQ ID NO: 1104 - protein, 135 aa, Mus musculus
PEQTPRRTSRRIMDRVPFCCLLFIGLLNPLLSLPVTDTGERTLQLPVLEEDALRALEELERMALLQTLRQTMGTEAGESPGEAGPSTETPTPRGSMRKAFAGQNSNTVLSRLLARTRKQHKQHGAAPECFWKYCI

SEQ ID NO: 1105 - DNA, 25899 bp, Homo sapiens
gtggtaagtgagatgggagaacattctaaacagggtaagaggaaatacaggggtaaaagatggcaggctgcaattttaaataacggctgtcggccaggcgtggtggctcacgcctgtaatcccagcactttgggaggccaaggcaggcagatcacctgaggtcgggagttcgagaccagcctgaccaacatggagaaaccctgtctctactaaaaatacaaaattagccaggcgtggtggtgcatgcctgtaatcccagctactcgggaggctgagacaggagaatcacttgaacccgggaggcggaggttgcagtgagccaagattgcgccattggactccagcctgggcaacaagagcaaaacttcgtctcaaatacaatacaatacaatacaatacaatacaatacaatacaatacaatacaatacaatacaatacaatacaatacaatacaatacaatacaatacaatacaatacaatacaatacaatacaatacaatacaatacaacacaacacaataaataacggccgtcagggtaggccttattggaaacgttatcgcctacttatttgaggagagactaaaaggaggtgaacgtggtagctacatagctattggagggagagcattccaagcagagggaacagccagtgcaaaggtcccgctgtagtttggaaactgaaaattgatcctcagtgttggaggtgggctctaataggaggtgtttgggtcacgggggtggaccccgatgaatagatgaatgccctccctggggtgcggggcattcagtgaattcttgctctgttagttcctgagagaactggttgttaagagagcctggccctcctgtctctctcttgcttcctgtcctgccatgtggtctctgcaaacaccagctcccccttgccttctgccatgagtgccctcaccagacgcagatgccagcgccatgcttcttgtacaagctgcagaactgtgagccaaataagactcttttcttaacattaaggttggtgcaaaattaattgcagattttgccgttgaaagtaatggcaaaaaccgcaattaattttgcaccaacctaataattgacccagcctcaggtattcgcaggtatcctcaggtattctcttacagcaacagtaaatggacctagacaggcccagaggtaggagcatgcaggggacatagcgggggaactgcaggagaagaggcctggcccagcaggcccactgtgagggctttgcttttctcagaaggaagaggtcttttaggcagggcgcggtggctcacaccggtaatcccagcactttgggaggccgaagttgcgggggcggggggggaatcacctgaggtcaggagttcgagaccagcctggccaacatggtgcaatcccatctctactaaaaatacaagaattagccgggcgtggtgggcagcgcctgtaatcccagctacttaggagactgaggcaggagaatcgcttgaaccaggggcacggaggttgcagtgagccgagattgtgccactgcactccagcctggtaacagagtgagactccatctcagaaaaaaaaaaaaaagaggtgttttgttagaaaccagtattctggccattggcacctgggggaatcctgaagtccaaaacctacttgtcaccaaagtagaaatatgaacagagtttgccctcacatgttcttcacgctccacaccacctgccagacgctgtacctaaccaccactggggacctgctcgtttccgccttttgtcctggggaaagggggctgtttcctgagggacggggcagtggtgggcaccaagcctggctacctggggccaggctcggctctgccactcactagcgttgacctggggcctgctgcggaggctgctgtgaggacaccgcgtgcaaaaggcaaatcgggtcaagcccactgcaagaaaacccagttacgtgatcgcccttcttgaaccatctctctcctgacgccagagcgtcttccagctgctggccctcttctctgccccctttctagcaagactctgcaaaagacttggtgcttatggtttccacctttttcccccttttgtttcttgaacccaccccaaccagacttccaaccccccaggccaccaaaacggctcttgtcaaagttgccagcattcagctgccttcttgacctctctcccaggggtttaacaggcaccccaaaccaacacttccaaaccaaatcactgacgatcccctccaacctattccaaactcgttgcacagtttggttacaggtaacgtcaccttgccaggttctcaggcccaaaactctgggatcatccttggtgttcctctttcatatccagcactcctgcaggtactgctggctcttccttcaaaacagatgcagggatctgacctcttcacagaggctggagtgagccttttttttttttttttttttgagataaggccttgctctgtcacccaggctagagtgcagtagtgtgatctcggctcagtgcaacttctgcctcacaggttcaagcaattctcatacctcagcctcccgagtagctggaattccaggtgtccaccaccatgcccagctagtttttgtatttttagtcagacagggtttcaccatgttggccaggctggtctcgaactcctgatctcaagtgatcctcctgccttggcctcccaaagttctgggattacaggtgtaagccaccaggcccagcccggactgagccttttaaacataatttagtccgaccatggtggctcacgcctgtaatcccagcaccttgggaggccgaggcaggaggatggcttgagcccaggcatttgaggctgcagtgattagtgattgcaccactgtgctccagcctgggcaacagagtgaggccctgtctcgaaaaataataataatagaaataaaacacagtttagattgtgccatactgttcttcaaaatggacctcctatctcattttaaaacagaaagtccttacggtggcttccggagcctgtgtgacctgcccttctgcatctttctggcctcaactcccacacttctcccctttgatcacactgaaccacacgggcctcctggctgttcctcaaacaggcctaatacagtcccaccccagggccttggcactcgctgttccatctgcctggaggctctttctctcagctagctgtgaggctctctccacgtttcctgcaagcctacgctgaccctctccaggaaaagagcccgtccatcccatcgcccacctgaacctacttagttatctgtggcattgatcagcacctgacactgaacataaactcggtgaggcttggtctgttttggtcattgctacatccctagtaccctacacagtccctggcacatgctcaatgttcgttgaatgagtgagagaataacattactcactgttcaacaaacacccttgtcgtctcctcattgctatatatatatgtatgcatttttttttagacaggatctcgctctgtcgcctaagctggagtgcagtggtgcaatcttggctcactgcagcctccgcctcctgggatcaggccatcctctctcctcagcctcctaagtagctgggactacaggtgcatgcaaccatgcctggctaatttttcatattttttgtagagacagggttttaccatgttgccaagactggtactgaactcccgggctcaagtgatctgcctgccgtggcctctcaaagtgctgagatgacaggcatgagccatgcccaggctcctcattgctggtaaatgacaaaaccccgaattcctcgatatggtcacgtgacatagccccactgatctctggttttatctggctgtgtccagcccttggcaaacatgctgggcgcatggctcaggctgatccctcatctgaccccagggcctttgcactcactgttccgtctgcctggaggctcttcctctcagatagcttcgaggccctctccacatttcctgcaagcctatgctgaccctctgcaggaaaagagcctctcctgtgaagtccccaccattctccccactatctcttgaggggaccagcacggggcctgtgaccccctcaggggttattgctgcagctgacagacgaggcattcagtagtcacttaagccaaatggttatctgaaatataggtgactagaaacgaaatctagaattcatgtagattagattaaattaaaattttaattaattttaattaatataaattaaaagtctatctgagagcctctaacctatgttttacatgaacacaagtaagaatggaccccgatgatgtctgcaggaagttcagaagttcaatgtcagttgaatatgagctgccctggtttcaggtatcctcaacttctctggacccaagtctgcgcataaaaatggtacaaacattgcagtattcaaagcacacacaaacatattcctcacagatcaccccaaattatgatatttatttggcaatcagtgaataggctttaaatatttggcaaagtcaattcctatcaatttctcttcatggaatccccacaaccgaggagaatcaatgtaacctcatattcagaagttatgaccagctgggcgtggtggctcacactgtaatcccatcactataggaggctgaggcaagtggatcacttgaggctaggagtttgagaccagcctggtgaacatggtgaaacaccatctctactgaagatacaaaaattagctgagtgtggtggtgcatgcctgtaatcccagctacttgggaggctgaagcgtgagaatagggacttgcttgaaccctggaggtggtggttgcagtaagctgagatcgcaccactgcactccagcctgggcgacagagtgagactctgtgtcaaaaaaaaaataattaatagaagttatgagcatattatacaacgacaaacgtgtcatcagggagagggagtttagattaatttcaaaactaaaactgaaaagaggtttgtaatttttatgatatgcttatccagtggatgggagtgctccatagacaaagccatcccaaatattaatggtttacttctttatgacacgcagacaatgcccctctcttttcagaagttactttgtttgcagctaattagaggaatcccacttctcagggtggtctttgttcatgtatgtcctggcacagatgtgaagccatgctgcttaatgcaagggccattagcgtggaatgacgtgctcagtacatttctgggacaaggtgacactgtcattgatggtctgttgaaggaaagaagctaattttcttttaagcgtaagcctttagtagtaatttaattaggccatgctgtaaaaccatcactaataactgtcagaagtaccccctgagtcaccagggaatgacaaagcttggcaaacagcctcttccttggagccccggagttcatctcccacctcattttgaaatggtcctcacgggtcttcaaagacccctgtctcttggcctgagtccgtccttcctctttgtgagacttcatgagtgctttacatatatataaacatgcatgagcataaacatgcacatgtaatacacagacagacaatgtaaaacagctttttttttttttttttctggagactgggtctcactctgttgcccaggctggagtgcaatggcatgatcacggctcactgcaacctcaacctcccaggctcaggcgatcctcccacctcagcctcccaagtggcccagaccacaggtgcacaactactcctggctaagttttgtattttttgtagagacagggtctcactaggttgcctaggcttgtctcaaactcctgggtttggcaatcttcctgcctcaacctcccaaagtgctaggattacaggtgggagccaccatgctgcatcaaaacattttaagaaaagaaaaaaatccctttattttcaattctgtaaaatgacaccaccagtgcttgcccacaagctcatcttttttttttttaacatagtagtaactacctgatattctagttcttttattatattttccaagtttttataatcttttggttactattttaatggttaccaaaattacattttgatacttaatgcacttatttagggcattgaggccaaaaggttgaattacaggagagatggaggattgtggggagagcaagggtgagtagggagaggaaggagggaagagggaggagtcaagtcactgagggcagagggcagaggtcagaaggccagtgggatcctggtccctgctcctccacttttcctgggattctggaagctatccagtgtctttccaacatgcttcaccttccttccttccttccttccttccttccttccttccttccttcattccttttcttccttccttccttccctctctctctctctttcttttcctacagagtcttcctttgtggcccaggctggagtgcaatggcacgatctcggctcactgcaacccccacctcctgggttcaagcaattctcctgccttagcctcccaagtagctgggatcataggcgcccaccactactcccggctaatttttgtatttttagtagagatggggtttcaccatattggccaggctggtctcaaacgcctggcctcaggtgatgcacctgcctcggccccccaaagtgctgggcttacaagtctgagccaccgtgcccggctgttttcttaaattggatggaagtggtttctcttggacgttaggttccgtcctctgtccgaccctgctggcacatgggggtgctgagaaatatctgtcgaaagagttaacaagtcttaagtgattcgagcactttccatcttagaggacagtgtgcgagcactcgccctgggctctcctgccagcaggggtcccccagggactctcttcactttatttgccctcgcaggaatcttctttcagttcctcctcctcggaggccacgcttccccgacttctctcgctggaggctccacactccactcaccactgaacggatggctgccctgttcctttcggctcctgctcagatgccccttttccagggcatcccgagggccctgtctgaaatcacacttgccctgactacctgcccctgtactgtctccttgttattgttcttcatagcaataaacaattcctacagcgtatgttaatgttgttgtctatcgcctccagtcagaaagttcatgagagtagaaactttttattttgttcaccgttctttcccctaaacagagactcccatagggctggtgccccactcactgattcaacaaatatttatcgagtctgcctactataaaggataaatacataaaatagtgcgatagccaggtgtggaggctcacacctggaatcccagcacttccgggggccgaggcaggagaatctctggagcccaggagtttgaggccagcctgggcaacatagcaagaccctgtctgtacaaaaaataaaaaagccatgcatggtggtttgcgcctgtaatcccagagggttggaaggctgaggctgaggcaggaggattgcttgaggttaagattttgagaccagcctgggcaacacattgagaccccatctgaaaaaaaaaaaactagctgagcgtggtggcatgtgcctgtggttccagctatttggaaggccaaggtagaattgcttgagcctgggaggtcaaggctacagtgagtcatgatcacgccactgaactccagcctgggtgacagagtgagatcctgtctcaaaataataaaataataataataataataataataatggccagatgtggtggctcacacctgtaatcccagcactttgggaggctgaggcaggtggatcacttaaggccaggaggtcaagaccagcctgaagtccttttcaaaccttttgtcatattgcccaggctggaatacagcagcatgatctcagctcactgcaacctccgactcccaggttgaagctatcctcctgcctcagcctccggagtagctgtgactacaggggcccgccaccacgcctggctaattcttttatcttctgtagagacagggtttcaccatgttggccaggcttgtctcaaactcttgacctcaggtgatctgcccgcctcagcctcccaaaatgctgggattataggcgtgagccaccgcgccttgctcggctttttcattttcttaccagtatcttgagcaaatgtttctaattttgataaagtccaatttatcagttttgttcatctattgattaatttacaaaaatggtatctatggtatacatcatgacttgtttgtttgttttgagaaggagttttgctcttgccacccaggctggagtgcagtggtgtgattttggctcactgcaacctctgcctcccaggttcaagcaattctcctgcctcagcctcccaagtagctgggactacaggcacctgccaccacgcccagctaatttttgtatttttagtggagacggggtttcaccacattggccaggctggtcttgagctcctgacctcaggtgatccacctgcctcggcctcccaaagtgctgggattacaggtgtgagccactgtgcctggccatgattattattattattattattgttattagtttgatgttttgatatatgcatacattgtggaatggctgaatcaagctaattcgcatgtgtattacttcacgtttttagcatttttttgtgatgagaacacaaaatcgatttttagaaatcttcaactatacattgttattaatcagagtcaccctgaggtacatagatctcttgaacttattcctcctgtctcaatttttttcctgtgtgatttgtgtcttgtctaagaaatatttgcctaacctgaggttgtgaaggtgttcatgttttttcccctagtagttctatcattacgttgtaaccacttttttttctttcttcttttttttttttttttgagacatggtctcgctctgtcacccaggctggagtgcagtgggacgatcttggctcactgcagcctcaacttcccaggctcaagtgatacaggcatgcaccaccacacctggttaattgttgtatttttggtagagacagtgtttctccttctctttttttttttttttagacagagtctcgctctgtcacccaggctggactgctgtggcgcaatcttggctcactgcaccctccgcctcctggattcaagcaattctcctgcctcagcctcctgagtagctgggattacaggcacgtgccaccatgcctggctaatttttgtatttttagtagagacggggtttcaccatgttggtcaggctggtctcaaactcctgacctcgtgatccatccgcctcagcctcccaaagtgctgggattacaggcgtgagccactgcacccggccgagacagtgtttctctatgttgcccaggctggtcttgaaatcctaaactcaagtgatcctcctgcctcggcctctcaaagtgctgaaattacaggcatgagccaccgtgcctggcctatctttgtaacttttgtgtttaggtccacagaaagttttgagcaaagaactaccatgatctgacttatgcagatgcttctggcatcactctgctgtgctgagcctgtggcaggcccgaaggcagacttcaggacgcctgtcggggacctttccacccatccgggcttggaccagcttgggcagagtacagttgggagtagaggccacattctggaaatgtttatcagcgagttttctggtgttaagtccttcctccctccttgctgaataataatcaactttatgaagttatttcctttctctgaagattgaagtgcttgcggcttcacatgaggccacgtgtatgtacagaattgtcttgagcctggagcaatgtttgctatgtattttaacttttcactgttttaaaggaaatagctggttttacgttttaatccacagattgtcattcttcagggatggcagccctaaacacagcatggcaactcatctactcactcatgaaagattaaaaaatggaaaccaacgtatttcatcttatgctctgcgtcacttctgctcggactcataaatccacgtctctttgctttggccacttcaactcatatccaagccttcctttaattcatgatttattgctgtaagttgcctcttttgccagatttataaactcactgttctttatataatacctactttgtacactaggcaacaagacagttaatttattgtctatgacttgttaccttgaaaaattacatcaatgcaaagtgattgccttttagcctccatagccaataaattcattttttttttttttttggagaggatgatgtcaggtcataggatgatatatataatcagtgagcaggcagaatgaggagacagttgaaagttctctacaacagaagccaagaaggaagccgtctatcttgtggcgatcatgtataagctggcctcctgctgtttgcttttcataggattcttaaatcctctcttatctcttcctctccttgactccagggaaatatcctttcaactctcaggtaagattttttttttccccttatgttagtcttgaaagagcctttactagtcttaaattcaatgttagagataagaatgggattcctgctcgaaggagtctggagtcttgttctctcaatagtcccagctttgaaaagaatattaaaggatccttactgcacattttagatgtagtaatggatacagttttttttctgtctctacaatgtaaaaggagaagaggataattgcttgtttcatgttacctctgtactcttgttttgggtaatatatacatttttccaattttaaaaattgcatgaaatttaaaacatcattacttttagtttttactttaaatgaactggttgaatgtagcactggttgttctaattatagattattaatggatttatttgtttcaccttttgtttaaaaaaatcatctgatatgtgttctacgaaacaaaaatgtttactaaaaattttttagtaaatgacaaactagggaactagggagttcatagacttccaagtatattgatcgtttccttttgatttatgttaattcagtttaagtctaagttgagttaaagaaatacacatcagtcaagtagtttctcattttgccattatctttccatttagttagagaaatgagaaagctaatgcttggggattaggttccatcaaaaacttaactagatttaatcttatctttaatcttgagtactttttaaataggctttttttaaataaagaaaaaaaacaaacaaaccctcttttaagccaaggattttatagtttctcgtctctaaaagttcatcccaagcagctttctgatgatcgtcaagcactgtcatcaggcactgccaaccaacttcccgagtcaccgagatgatcattggctgtcctactaatagttaaacactggcattaactttactgaatctctgctatttacaaagaaacagcacacatctcaagatgaaataagtgaaaatactcagctactactgtcatcttaaaaaattttacaagtaatttaagaaacatagatgaaatgagtgtagcatctcacacaaattcgaaacaagtggcagcttatcgcagaatttgttctcatttatttctccagaaatgtgctttcctatcagcatttacagatgatgaaattttatagattttcattaacagtctttagaagtgctgtgaatgtgctctgatgcctttatgatgatctgctcactgtcctccaatcaaggttgcagctatttgtaagcctgtggcacgctggtcccacacatggcctcccaccctgactcccacagcctcgaatcgcaacacagcagcaggtctgcacttaccacgcctcacactccggtgtgccctttccacacaccttaagcgcacttaccatgcattctatatgccatctggtcgaccacatttcacataggaaatgccacaatcaagttccttacagatgattttgaagccaattctaagtataataattgtattgaaatcttgaagttcagtaaaagaagaggtgataccatcctactggctttataggaagattgtaaacgatctttctttttcctctccaatgtcaccacccaaatatctaaaagcaaaaaggcagtaggcagcagtagataagcagaaatgagggagagtcagactttttgaaccaaaatggttttgagaaaggctgtggcttatccctcagctctcgttcgaggcagccgaggggcttggctcatcacgcgggtgtcagatccacgtctcccggcttcccattctgctggctggcacacgggctggtagcatttccacctcttctagaataccactgatgacacgtcatgaactcagcgttggaagtttttctagtgttcatctccctatctctggtgctcgccaaagacacaaggaacagaaataactaactgaaggatgaacccaattctaagtatctgtttttactctgtagcacctcatgaagacgcgcgcttaactccggaggagctagaaagagcttcccttctacagatactgccagagatgctgggtgcagaaagaggggatattctcaggaaagcaggtaaaatgcttctcatgtttatagcgtgtctgatttaattgctactgaacttaccgtctgtcctcatctagaagaggtaaagctctattttggaatataaagatgagctatataaaataagtaattaccaacactctcccctcccggcctgtgcaaccttcttttccccagcagctccttgctcgcactgtgctctttggtacctcagcattttgtctttctgtgtggacttttatttttgcggggtagagcttggtggtaattattccagtttccagtgagtgcaatttaaaatcctagtttcccgtttactgaaaacttaaagtaatctttctgtactccagtttcttaatctgtaatcaggaatgattaagtttccacctcagaaggtaacttgtgaagagtcaatgagtcaaggcaagtaaaatgctcgagtcacacagaaagtcattaataaaatgtcagcttattcccccgtggccacattcccccaagcattgacacatatgctcaggaagttctggaaacaaaattgagccttttgctgggtgcggtggctcacacctgtaatcccagcactttgggaggctgaggtgggcggatcacttgaagtcaggagtttaggaccagcctggccaacatggtgaaaacccatctcgactaaaaatacaaatatcagccgggcatggtggcgggcacctgtaatcccagctactagggaggctgaggcaggagaattgcttgaacccaggaggcagaggttgtggtgagccaagatctcaccactgcactccagcctgggcaacagagcaagactctgtctcaaaaaaaaaaaaaaaaaatttgagccttttaagataggtattgtttaatagacaggagttcatttgttataaaatatctttgacgagctactggactgcgaagttactgaggacaatgcagtgacttctgtgaattcgagataagaacaggagtgcctgtctgtctgcattcaagaaaagcttgctgcagtgtggaaaaagaccagaaactagacataatttagtaatattattttgtatattttaaaacaagcatacaagagaaacaacagatctgatgaactggcttcaaaactgtttttcagactcaagtaccaacatttttaacccaagaggaaatttgagaaaggtaagtgactctatttatgagttaggtttaaaaaggtgaacattctgtactggttttacaggactctgaattcatgaactagaggagtgttcttggtggaaaccacaccttaaaataattggccagcatgaccaggcgcggtagctcatgcctgtgatcccagcactttgggaggccgaggcgggcggaccacctgaggtcagaagttcgagaccagcctggccaacatggtgaaaccctgtctctactaaaaatacaaaaattagctgggcgtggtggcacctgtaatcccagctactcgggagactgaggcaggagaatcgcttgaacccgggaggcagaggttgcagtgagctgagatcgcgccactgcactccagcctgggggacaagaatgagacttcatctcaaaataataataataataattggccagcattatttcaaagcattaatttttccaaattttgattgatataagatctgaatgcaacaggaacctacccagtgcctgttttgggtaaatcaaataagttgtgaaagaatgaaaaaaatgggtgaggtccctgctctccagtctggcatccacttgtgctctcattcaccatctaacatgcggcccaccgccagcagcaccgggagcacctggaagccagtgagggatgcaggatcttaggcccacctaggacctgcggaagcaaaatctgcatcttaacaagatccccaggtgattcacatgcatgggaaagtgtgaagggcactgcaagacaacatctaatggaggaaggccatgctccagacattgacctgaacgatgtacagaaggccgggtgcggtggctcacacttgtcatcccagcacgggaggccgaggtaggcggattgcttgaggccaggagttcaagaccagcctgggcaacacagcgaaaccccgtctctacaaaaaatacaaaacttagccaggcgtggtggcatgcacctgtaatcccagctattcgggaggctggtgcaggaggatcacttgaacctggaggcgggggttgcagtgagaggagatcgcactacttcactccagcccggggaacagagcaaaactccatctcaaaagaatacaatacaatacaatacagtatacacaatacatacaatacacagaagacaatacatgcacagaacatgttactatttatttatttatttattgagacagggtcttgctctgttacccaggctggagtgcagtggtgtgatcttggctcactgcaacatccacctcccaggttcaagcaattctaatgcctcagcctcccgagtagctgggactacaggagcccgccaccacacccagctaatttttgtagagacgaggtttcatcatgttgcccaggctggtctcaaactcttaggctcaagtgatctgcccacctcagcctcctaaagtgctaggattataggcatgagccacctgcccagccgctgaaatgatttaaatagaaatcggtcaatgagggtttaggaaaattcaggacaatcgctgggctgaacagactggaaggacactcattagaggtagggaggtgggcacaggagccccacgggcccgggacactcttgttacaattatagtccagggaaaaatgcaaatacttttaagaagtccagtgtcttgactcaagattcctttttcttataggaatcgtcactcgttggtaacttatctgtttttttttgttgttgttgttcgtttggattgttttagtttcaggatttctctggacaagatcctaacattttactgagtcatcttttggccagaatctggaaaccatacaagaaacgtgagactcctgattgcttctggaaatactgtgtctgaagtgaaataagcatctgttagtcagctcagaaacacccatcttagaatatgaaaaataacacaatgcttgatttgaaaacagtgtggagaaaaactaggcaaactacaccctgttcattgttacctggaaaataaatcctctatgttttgcacatatcatgagtggttattttccctataaacatgtcctgaaaatttataattattcttttcttccatttatccttagaaaattctttgacatttcagaagcaaagctaatgaatgaacagaagcaaacactaagaaaaagtcacaaaagttaaacttttgttaaatggcaaatcatttaaataaactacattatcttagctatgatgtcctctcaaccttttaaaaagacaacatattacttttaaaaaataaatcacagccaggcacagtagctcacgcctgtaatcctagccctttgggaagctgaaatgggtggatcacttgagaccaggagtttgagatcatcctggggacatgacaaaaccctgtctctaccaaaaatacaaaaattagcagggcatggtggcaggtgcctgtagtcccaactgctcaggaggctgaggcacgagaatcgctcagacctttggggtggagcttgcagtgagccgagatcggaccactacactccagcctgggcaacagaggaagagtgtcttgaaaataaacaataaaataaataaaataaaaaataaaataaaacaaaataaaaagaaaacagtatcttggcttggaaaaaatctctagttacgggtgtctgagatgaagggcgggagtgtctgatgctccttggtttctgaagttcgtgggggaagttcatgtgctgagattctttctcttggctgaccaaagtcctgaacacttgacaattttaatcttttaacattgaaacttgtatgatctcagcgtctgtgagctcaaggatcacagtttcttacaccgggaaaaacaccttgatgtctcttgcagagagaagaaagctgaggcaagatttaagattgtggaagaaagagcctggcttacgaatttttaaaaactatgtgtgtaagtactgacttctattccgtgaatacatctgtataaatgtggtttatgtatgtatagaatatacagtgtgaactcctgagagttctgtgtggttctacacagaaccatgtataggggaggcctggatgtttatgagaaacttgtttctctcattgagctctgacatcccaccacattccagaggggtctgcaacaaccaaagagcaacacacgacttgtgtcaatcttgtcactgaccatcacaagtttcctagagagtacaggtctcagagagtttaccctaaagacatcaagaacttggccgggtggggtggctcaagcctgcaatcccagcactttgggaggctgaggcgggtggatcacgaggtcaggagatcgagaccatcctggctaacatggtgaaacctcgtctctactaaaaatacaaaaaaattagccgggcatggtggcgggcttgtagtcccagctactcgggaggctgaggcaggagaatagcgtgaacccaggaggtggagcttgcagtgagcggagattgcaccactgccctccagcctggcaacagagcgaggctccgtctcaaaaaaaaaaaaaaaaaaaaaagacatcaagaacaaatctaagggagagatgttttaaactggaatgaatgtgcaagctcagaaacatgctaacattgaggacagctatgataacactgtggtgtgtctctcagtgttgaaattaaaccagttctctggaacacaatgttggcaccataaaactattcctgtatcagagataacttaaaagtggaattccactgcagaattctgaagtccctactcattttagtgtatcaggtgatgattcatacagattggggctttgcatcaggtttctagggtcagattcctactcccagtgcacaccagctgtgagtctctgatccagttacttgactccccctgcctcagtttacttctctgtaaaatgacaataacacaatgcttatttcacagggcagttgtgaggattaaataattcacatcaagcacttagaccagcacctgtcagagtagtatacacgcaaagtatacttagctatttttcttcctgctcttattatggtttgttatagaaaagaaaggtgcaaatggtctgaaaggtgtaaactttaaaaagctctgttggcttcaggatcttgttccctattttaatttctagattttgttgccaccagttacacagtcagatcttgtacacaggttcaccctagctcccacaagcttagcgttccaataatggaacactaggtgtaaaagggctaaataagccaatacatttcaaagtgcctgcatcttcatcctccacatagtaggtgctcagacacattggccaaggcaaacacagaatgtgcctgagaaacacaaggttaactaatatgagggcccctcaatagatcataagaagcacttctaaatgatacagaatacacattcaaagatttgttgacacagggcaggacaatttctcacgttttacatgtacagagtttatttgttgtttttacttaaaaagatacccaactgaaatattactaatgattaaaaacaaattcagagttaattacaaattcagttgaaacaaaatttcagtttggattaaatttacactgtgaattacaatgaagtgtcactcaattgcaaaatgatttccattcatacagcattttgtttttcataaattttgacctctgaccaaagaaaacacagctttttgggtaacattcatgaaaacattgaagcctataatataaatttttattaccactttcaatagtcattaatataaaaagttaacaaatttaaacaacaaagtttaagctggggagagccccctcggggggcatcggtcaagctgctgaaccccctgctcaccgccagcagcaggtgcaacctgggagtgcgtgaatgcgtccacccacaggaggagcgctcctcatgctctgacagttctgcgacaagcaccagtttcaaatcaaacctagtataacaagtactccataaaacgtgtgctaaggcaaagaaataagcacatttggataatacaaatatccagaaacaatggaaaagaaaggcttctattagagaacagaaggcttagcatatatgagtgcgcaatgatcctgatagctacggatactgtttttatttacagtggcaaaaactttattactacagaaggtcactgacagacaatctactggctggttaattgtttcaaatttgattctttatcaagcaaaaatatcacacaacctgatcaacacacacacaaacgcttcagaaatcacttaactatcaagatggagcagactatgagagctatttataaaacacgaatatttgcatggaactgcttaatatcagaaaattccaagaactgtcaaaggcagcatttgaaaatagttctgacaccttaagatggaattaccatccagaaagccactactttgaaaggaaatctgagctatgaggatggtcatcatggatgaaaaggtcgattttcctaatcattatcaggacgcatttacaaaaagctgtaaaacttcaaaggagaaaagtattttccttaaaaaaccataaaaaaccaaaaacaaaaaaaggaaaaaaaaataaattagtttgttgcaagttatataaagacaacaggttactgtaaccctcattttcttctatttgttttttctgatctgcaggggtgtgaatttcatctatcattccaagtttaagaaggaatcagggacttctctaaaaagcaccagagagtgagctgatttatcaagtaaacaatcacactcacttcttaaaagacacaactacaaacgccatagaaagcggtgactgatggagcctgcaggaccctgtgggcgaggacaactgggctcgcctggacgttttctcttttgcagtccccacaacactgccctgttcaagggcaaacaaaaggcagtgccagtcagacctgtggtagggctggagcgacctcttttgtataaattgattggaaagaaagagttaactgttttggtaagaatgaaaatttaaacacagaagtatgtaagaatgatactagcttttacattacttgtaaaacattttacaatcattattttaaaaacaaaaatactcaaaagggcaacagcactgggtaagaagctctttcattttaatattacacatgcaaatgctaactgaaacttacaagaataggcccatggtaagcggatcgatttttaagataagactttcagaatttcactggaaggtgggaaatcaataggaaagggatctacaaggatgaaggccaaaactcaacccccaaaacctggttatcccagatatgctaatggacagtatgtgctaatgtgttgtgagaaaaccggaatgtttcatcttaattatggaggggaacgccaggttgaatgaagcctgtatgaacgtactacattcatggaaaccattatgaaaagtacacaacctgtaggtggcatttcttcaagcactctaaggggaaaatgacttatgtaacagaacaaaataaatgaggctaaggtttggggctcattctagctatacttctaattataatttactctgggtgacatctgaaataaagatacacatacctctttagaggccatccaatctctttagaagacaattcaactacaaaaagagcctaactggccattttaatatatcaggaacaaagagaagtaagattctgtatacaatgtctgcttcaaaaagattacgtgtattaaaaaatcaagaagaaaaaatcttaacattcaatgataacttcatggtcatttaaaagtccaggacttaaaaaggtctgtctgtgtaacacgtcttggaaagggtatgaaggttcatcctcacagtcactcaacagctgtcttctaccagaacctgaccacaggatgtggccgcaccatcagctgaatcttcattttcacaagtgacacaggcctccaaaaaagaacaaagcaggcgagttacttgatgtcaatgtcacctaaagagttttaaaacagtaaaaggctggtcacatgtttctaaatccccaacttattcatgtctgaaaatatttcattatagttcattctttattattattataactatttttatttttttttttgagacagagtcttgcggtgtcacccaggctggaatgcagtggtgcgatctcagctcactgcaacctccgcctcccaggttcaagcgattctcttgcctcagcctcccaagtagctgggaccacaggtgcccaccaccgcgcccagctaatttttgttttttagtagagatagggtttcattatgttggccaggctggtcttgaacccctgacctcgtgatccgcccaccttggcctcccaaactgctgagattacaggtagtagacaccgcgcccagcctcattctttattattaaaaggcaaatgacaaattgtttaaatacagtcatgtgccacatgacgtttcggtcaaaaacagactgcatatataatggtggtcttgtaagattatcctaccacatttttatggtaccttttctatgtttagatacacaagtaacactgtgttacaacggcctacagtattcaggacagtaacagctgtacaggtttgtagcctaggatcaaaaggctgtcccatagggcctaggagtgattgtagcaagctactccactgaggtttgtgtgagtacactctaggacgcttgcacaaaacatccccattactaagtggtgaaaggactgtgcttttgtttaaattgctgtggggctcatttttcatatacctgtctatttacaaccagaacaacactgaaaaaaacaaagacacttacaataaccagcccagctcctgctttttggtgagaccctacccagccattcttacatgacagacactcattcttttctttgaaaatggagatggggagattattctgggaagatggcagagtaggaagactaggactctgtctcctcacctagacaacaactggactgacaaaatgagtccgaggtaactatttggaactcgagtctatctgaacgcctgcaactttctaggaaatgcttagacggtaagctgtggttgcctgtggtcaatttcagcttgaagcacagcagcaactacccatccctgaccttggacaaggcacgtattcctggagcagcctgcacacagcttgtgggagtcagagtgggcaataaggaccccgtcttccaacaatcataaaacaagaatcaataagccctgggaaaggggagaatctggtttccagaattactatgttattagattcaaatgtctagttttcaaccaaaaaaaaaaaaaatcattaaggcatacaaagaaacgccaaagtacagccccagcttgtgcgacccccttcctgcccatgggccacatgcggcccaggatggctttgaatgtggcccaacacaaattcataaactttcttaaaacattttgagttttttttagtgatttattattttttagctcattaactattgttagtgttagtatactttatgtgtggcccaagacaattcttcttcttacaatgtggcccagggaagccaaaagattggacacccttggtataggccattcaaagggaaaaataaaccaatagcaaaagtctctgagaaagaccagatgaaagaattgcgagacaaagattttaaaacaactgaaagatgatcaaagaactggtagggcacagtggctcacgcctgtaatcccagcactttggaaggctgaggcaggtggatggcttgagcccaggagttcaagaccagactgggcaacagagtgaggctccatctctgggaaaaaaaaaaaaattagccaggcatggtggtacacacttgcagtcccagctacttgagaggatcacttgggaccaggaggtagaggctgcagtgaactgtgatcataccactgcactccagcctggatgacaaagtgagactgtcttaaaaaaaagaaagaaaaagaaaaagctgggtgcggtggctcatacctataatcctagcactttgggtggctgaggcaggtggactgcttgagctcaagagttcaagaccagcctgggcaaagtggcaaaactccatctctacgaaaattaaaaaattagctgggcatggtggtgtgtgctagctactcgggaggctgaggtgggaggattgcttgagcccaggagactgaggctgcagtgagccatgatcatgccactgcactccagcctgggtgacagagtgagaccttgtctaaaaaaaaaaatagaaaaaagaaaaagatgatgaaagaattaaagaaagacatggagcaaaatcaagaaaacaatgtacaaacaatgtaaatatcaataaagagatagtaaacctaaaaagaagccagaaagaaattccataaataaaaagtacaaaactgaaatgaaaaattcactagagggattcaaaagccgatctaagcaggcagaagaaagaatacacgtatgaagaccggacaattgaaactgtcaagtccgacgaacagaaagaaaaaagactgaagaaaagtcaacagggcctggaggacatgtgggaaaccatcgagtggaccaacataagcactacaggggccccagaggaagaaaaagagaaagaggcagaaagattattcgaaaaaataatggctgaaaactccccaagtttgatgaaaaacatgaatgtaaaagtccaagaggctaaatgaactccaactaggatgtactcagaactcggagatccacactataattaaataccgtgcagtcaaagacaaagataatcttaaaagcagcaagggagaagcaactcacacatgcaggagattctcgataagattatcagcagatatctcatcagaaactgtggaggccagagggcagtgtcccagtgtattcaaagtgcttaaagaaaaaaaactgtcaactaagaaatcctttggccaaaagtaagggagaagtgaagacattcccagacaaacaaaagccagggagtttgataccactagacctaccatccaagaaatgctaacaggagtcctgcagggttgaaatgaaaggacactgacagtaacctgaagctgtgtgaagaaatagagatctcagcgaaggtaaatattatgattgcaacgacaatgtgcaattccactttttgttttctacatgatttaagaaactaatacattcaaagaaaactagtagtctataaaatccagtattattttaactttgatttgtaatctcatattttgctttctatattatttaatagattaatgcataaaaataattatgtttttggaaacacaacgtataaaaacctaatttcataacttcagtaactgaaagaagatggagatggagctctacagaagcgagtttttgtaggttatcaaagttaagctggtataaattacacactggagtgatatgttagaatgctaaacgtaatccccatggttatcgcaatgaaaatagctacacaatatacacaacaggaaatgagcagggcattacatttcacttcaaaaaaccaactaaacacaaaagatgacagtaatgcagcaaatgagggaaaaaaaaatctttatggcacatagaaaacaaatagcaaaatgccacaagtaagtccttctttaccagtaattactttaaatgtaaatgggctaaattctccaatcaaaagacagagattgactgaaccgattttgaaaggcactattcagatatatgctgcctactcactttagatctagatacagataggttgaaagtgaaaggatgtaaaaagttactacatgcagatagtaaccaagagagtaggtacgtctgtaagtcagtcacaccaagacaaataatgtatgattccactcatatgaggtgtgcagagtagtcaaattcatatggctcttgcctgtaatcccagcactttgagaggctgaggcgggcagattacttgaggtcaggagtttgagaccagcctggccaacatggggaaaccccatttctacaaaaattagctgggcatggtggtgtgcgcctgcaatcccacctactctggaggctgaggcaggagaatcacttgaacctgggaggcagaggttgcagtgagccaagatcacaccactgcactccagcgtgggcaagagagcaaaactttgtctcaaaaaaaaagaaaaaagagaaagtagaccagtggttgcaaagggttgggagaaggaggaatggggaagttattgttaaatgggtacagagtttcagttttgcaaaatgaagagagttctggagatggatggtggtgatggttgcataatgtgaaaatatttaatattcttgaattatatacttaaaaatagttcagaaggtaaattccatgttatgtgtattataccacaataaaaatgttagtttttaaaaagagggggtagtaggatttcattgtcttgcttacttcataagccttaatatcatactttaacacctaactttactctcttttttaaaaatatttttacacacacacacacacgaattatttgtcttttttgagactggctggaatgcactggcgagatcatagctcactgtagcctcaatttcccaggctcaagcaatcctcctgcctcaacctcctgagtagttgggactataggtgcacgccaccacacctggctaattgttttgatttttattagagatgaggtttggctatgctgcccagcgtggtctccaactcctgatcctctcaccttggcctcccaaagtgctgggattacagacgtgagccactggactaggcctacttgttattaacttgactcttcaacctcccatatcttgatacttgcgggaataaagatctcactactagtacaaccatcactaccattaccacagctgccaccaacactggttgggaccattggtaaatcaaagctttactgttcaggctattcacaaataatctcattgagaaga

SEQ ID NO: 1106 - DNA, 652 bp, Homo sapiens
tccacagattgtcattcttcagggatggcagccctaaacacagcatggcaactcatctactcactcatgaaagattaaaaaatggaaaccaacgtatttcatcttatgctctgcgtcacttctgctcggactcataaatccacgtctctttgctttggccacttcaactcatatccaagccttcctttaattcatgatttattgctggaaatatcctttcaactctcagcacctcatgaagacgcgcgcttaactccggaggagctagaaagagcttcccttctacagatactgccagagatgctgggtgcagaaagaggggatattctcaggaaagcagactcaagtaccaacatttttaacccaagaggaaatttgagaaagtttcaggatttctctggacaagatcctaacattttactgagtcatcttttggccagaatctggaaaccatacaagaaacgtgagactcctgattgcttctggaaatactgtgtctgaagtgaaataagcatctgttagtcagctcagaaacacccatcttagaatatgaaaaataacacaatgcttgatttgaaaacagtgtggagaaaaactaggcaaactacaccctgttcattgttacctggaaaataaatcctctatgttttgc

SEQ ID NO: 1107 - protein, 139 aa, Homo sapiens
METNVFHLMLCVTSARTHKSTSLCFGHFNSYPSLPLIHDLLLEISFQLSAPHEDARLTPEELERASLLQILPEMLGAERGDILRKADSSTNIFNPRGNLRKFQDFSGQDPNILLSHLLARIWKPYKKRETPDCFWKYCV

SEQ ID NO: 1108 - DNA, 225734 bp, Mus musculus
  misc_feature (1)...(225734): n = A,T,C or G
actgaatctatagatgaagtataatactctagtctagaaataaaacacataaatgacaacatgtacggagacagggtatgtcaacttgacacaccaactagagttatctgaaaggagggaacctcaattgagaaattgcctccataagatccagctgtaaggtattttcctaattagttattgatggaggagggcccagaccattgtgggtggtgccatccctgggatggtagtcctgggttctataagaaagcaagctaagcaagacatgggaagcaaggcagtaagcagcatccctccatagccctgcatcagttcctgctcccagggttcttcccgccctgttggagttcctgtcctgacttctttggtgatgagcagccatgtggaagtgcaagctgaataaatccctttcttccccaacttgcttttttcccccctgtcttatggcaacaatagaaatagtaagatacagttcttagatacatttgtaaaacatcaacaataatacaaacacttccagagaagaaaaatcaggttaaaagttgttaaaggatggaagaggcaaggcaggtcagccatatcctgacctgcagccccattcagagtcacaagacactgtgctatcaatgttgaaacagctaagggaaagcccaaaccactcccctataatgagcattgaaactcaaagtaatttgaatatgtgaaaaaagggctggggcatagctcagtgacagagctatggtttggctcactagccatatgtgttctctggaattataatgatggtggtgatggcggtgatggtgaaggtggtgatggtaataatgatatataataatgaacaatgataatatacaataagaaatgagccaaggtacgattcatcatgagaaagaggatgtaattgctctttctttttccttaatacataccacgttataactatcactctaagtactgttttcatgatgtacatacagacaaatttgattttcatttaatttagtgtagtgttttttaaagtttcttgagacttttttacatgagtgtagacagccagcgcctaaaagatggcgctggtctccagtacaccgtcactgtaaacaacaccactgcgcaggtgctagcctgaacctggggccaacccctcccgagcaagtgcatgcaaattaaggtgccagcagactgaccaatcccaggaggacacaaagcttttccctgtgctgggtgcccgggagcatcgaggcgttcctgcaataaagctgttgagaagaatcgaccttgttgcgttttccttgccggacgaggtgggcgtgacacatgagtgttatttggaggaatattactaaatctctcattgctttgtcatttcatccctatctttgtttgttgtttccaactttgatagtctcgtggttcagtttgatttctattttcagaattctgcaaggtgtgttttattgccaagggtgactaccatggtgggtacggtcatgggaagaatgtgtattgtgtgactgttgaatgattaaaatttcccaaaatgtgacactaaatattaccattcctattcaataatcctagtaaatcataaacacagtaagcctaattaaatggatatcaagattcatcacagagtaactcaagtcaaacataagaataccctgaactcttgaaaatatcttgaaagccagagaattgactttacccattggagacaagccattgagttagagaaactattctgtaaaattcaactagatcaagttgattggtgatgatgttcagtccaatccttttcggtttggaacttctacccatcggatctgtccatttctaataagaggccactcacagctctaacaattatcaagatcttgccattttattttatttattaataggaagcaatgtctctgcttcacgttgacaagatgggtgagtttgagtcactaattctaaagggatttctctatatattatgtattgcttacttatttatcatgtgtgggatggtagtggtgtgggcatttacatggcatgatgctcccatggaggccagaggacaacctgcagaaattgatatcctccttccacaagacaagtcctgatggtcaaactcagtgcttcagacttggcagaaaatactaaactatctctataataccattttcttttgagcataaatttacaaaaagttaaaacgacaatgaagagaaactatgtgttcttctcccaggtttcctcaatacctatttctcagatacataggaaacctaggacattgacatgtgaagattgggtaaaaattttctggagaaaaattatttttgttcttcatcagtgtgatggtttgaatattcttggttatggtgacttggtcatggtatctgctatagaagtaaaacccttactaagacagaaatacccaaactaagacaatctgaaaatgtcttattcgttcgtaaaatgttaggtgataacttcttccatctctgtcatttccccaaaaaaaggctgctatcagctgtaacccaatagcttttctccactgggtaaagtcaaatctctgactaagttcaatatatgcttctgtttgatttatttaattatgtttactgtgtttatgatttactaggactcttaaattcacatgtttatatttattgccaattttaaccatgatctcttcaggcagtttatcattactctttcgtctcctgagattctgataacaattttgctttttagtctcctggacccctggcaccttttttatattccctaaatttttagtttcagtaattttattcttcaaacagcaaatttcattgattgctagctccttcacagcctgagcaactcagcaagattctatctgaaaaagaaaaatcaaaataattggacagaggctcaggggcagactgcttgcctagcttcagtctgcagcattgccaacaagtaataccattttactacatttttattgctgtgtgtttaagtttaattttttcagttctttcttccttgtacctttttttttttttaatctcttctcacaaatactcactgaagcatttttatcatgtctgccttgaaaacactgtcaggcaaatctggtattcatgccatcttgatgttgatatatatgcattttcatttcttatttgtgtttacgatttcctgagctttgcaaagtgagggattctcagttgagtcttggaccctctggcctttaagttatgagatttttctatatttaaacagtctattttaatcagccttcctggcaccagactgatgggcagttgagagggaactcactcattattgtttggtagtggtagaagttcaatttccatactcagcttctgttgacattcttcaagaagaggaacacactatcattgccaaacaagagcagaactcaggattctctttgtagcttttcaatatcctcctagctgggaaagatgggagctctttactattgctccccaggatggcaccatgattgagttatccacatagtcagaatcctctactgaagtgtctcaaatgtcatctaatcagataggtgcatttcatgaccgagactgaatgcatgatgattcttctggatgatgtcagtgtgaatggattgaggcatacctagaaaactagctgagcacgacttcggtttgttgaagagattactagtgtggcaatcattggactgatggaacaaattcagtatggctgagcaccatttaattagctggagatccaaggcacaagaaggaagaggagcctagccttctgcctcttccttctgaagcaagataaacaatcttttccagtttgtcacgtgtagtgctatcaacccaacacaatctagaatcacccgagaaggaaggctctgttcgagactgagttcacctatgagtatgtctaacgggaattttcttaattgggttaactgaggtaagaatggccaccctgaatgttaataacaccatttcgtgggctgaactgtggactacatgaaacagagtgcaagctgaacactagcaggcatgcgttcattcattgatctctgctcttgattgtggatgtggtgtgatcagctgctcaaagttcctgccaccttcacttccctccaacgatggtctgtgaccaggaatggagattttaatgcatcctttctcccctatcctactgcttttgtctgggcactttattgcagcaacatgagacaaaactaagatacaattgctgaacctgtctgtctgtctgtctgtctatctatctgtctatctatttgtctatgtatgtatgtatgtatatatgtatgtatgtatgtatgtatgtatgtatgtatgtatctatcctctctctctctctctctctctctctctctctctctccctctctctctctctctctctctctccctctctctctgtaacttttcattctggtctggcaatattagtcctttcaggatccaaagcctttgacctcaacctcctttgttctgtgacttctggcttcctgggttgaatcaagcttttgagttctctggattttcagattgcagaaaaagtcttttcagtctgtgctttgcaagccatccctctgttaaatacatatccacatctataccactattggttttgtttctctggagaacctgactaacacaggtttaaagcctagcttctctgttgacttggttgctccttattccacagaaggattggcagtcatactacccactgggtcttctcagatgctacttgggggggggggtgagggggggagaggtcaccttgttacagcccagagtgggtgtcagtttcccgcctgacttctgatgaggtgggaatcacagttggttctgtgatgttttgtttatagaatagctattatctacagctttggtcctgctaggctaccctttactggagacagcacatgttcttagaggctttcattagtcgtgatgttggcatttccaagcagccaaaagtaatttaatttaaatttgaagtatcataacctatcaaaaaaaaaaaaacattttagttggtgtaatattaacaactatgttacttaaatcaaatatgccagtaatcaaatatgccaataacccccattcaaaatgaaaaaatcattaattcataataattttcagatattctcctgactataaaaaatatagttttgtacttctcatgcatgtctagaattcctcagtgtcttaggattttactgctgtgaacagacaccatgaccaaggcaactctaataaggatgacatttaattgaggatggcttacagtttcagaggttccatccattatcctcaagtcaagagcatggcagccttcaagcaagcatggtgcaggaagagctgagagttctacatcttcctctgaaggctgctagtgaaagaccgacttccaggaagctagggtgggggtcttaagcccacatacacagcaacacacctactccaacaaggccacacctcctaatagtgccacttcctgggccaagcatatacagatcatcacactcagtactaataattattaggtaatattatttttagttgttgaaccaaaacagttctcctctttcctctatgcctgttacttagttgaagaaacttggtcatctggtatacctcatctcctagctatggttatgttatgttttatgacactctctaatagtcctgcaatctagaagttaagtaaatatctatgaatacattcaggttcaatgttttctatgtttacttaaacaaacaaacacaatcaaaaacagaaaacaccaaagatatcgccctccctactgtaccacatagagagacccactctgaatagttaaatcagttttcagaaatttgtaactattattctgtaaaatgctcccctgttctctttcccagagtgccagacttctagaaggcgatattctggtattgatactgaagttgacacagctcccactttgttatgggacactttggctcccacaccactatacactgtcttgttgttacaacaacaatcataattaaaaagacctaacagttttcacagccattagtttgtggatcaacctttcagagaagtttgccaagtactgttgctttctttcttacttcctttctaacattcctatgtttactgtttatctttcttagaataaacactttcacctttcccagtgaaggtagagtaattgtttatctttttttcccaacattttgaaagtaatgacctgtagggttatagcttccaaactgactggctaaccattttgagcatcctttggggctcttgaatatgtttatacttcatacatctatatttctccccctgtaaatctgagtaaatacagtgagcagtaaccatgccgaagcctaacgccttgccatttcctccatcagaaaaagtagcccatcactttagaattcagcttgacgcagacctgaggaacacggacaattacttgccggataaaacctgaatgatttctactccagttcccaataaagccctgtccctatgacatcacatgacctaggcctctgcatgtgtgcacacatgcaggccacagtgtaagtgtggggtccagctttaggctgcccggggcatgagtgtctgggtgattctcccatctctccctctcagctctccataacaatgctgtgattgcagatgtgcaccaccacacctggcctatcaattttcgtgcttgagtgcaggttcacacatctatccacctttcttcctttctctctcacattgttcccactggatgaaatttgagacatctttttgtgctttcattcttaaatgagatttactcctccaaatacggttttgactaacttcttactctgtgcctgtgttataggtgtcaccaatttattttgctttgcttttagttcttttacattttaattatttttaattacatagataaatggatggcttcaaaactctaagagtcggtgtagcttccacaagattctctcctgcattctctttgccttgcatttttgttaggtttgacttattcttctattacagaacaatgcatagtgcaaacacacagacaaaaggcagcatgcaatgcgaaatcacatatcttgcatttaaaataatcatgataaggtggtatatgatataaacttaccatcttaatcattttgagagtagagttcactgggatcgcttgtacccaaacttttcaaaatctggaactctgcaaccagggagcaatagctagctcattgatcctctcctccctagttcctgctaacctgcatgctactttttgactcaatagctgattttgtcaacacctggctgattttcctcgaaccctctttgttagacaccactctgtaggaacacagtgctcctaattattttttctttcatctgcgtagtattccatagaacgaatgaagcatgtgtgcagccagttctttattgaggaaatgtttacaaaactagtccttggctatcacaacagtgctgcaatgaatagtttaatggatccctcattttctattttttccaagtattttttatgcaggttcctaaaagcggtattagggaatgtgagaatacagacatatgcgattttagaacatttgagcttaatgtaataagcagaaatgaaatcatttaagtattagatgagaaatcgcaggtaagattaaaattctgctttaactcatgaggtcacttatttacttctttaattatttgttccactcaaaacttgggggaaggggggaaatacctctactgctgtcagattcccctcccctaaactgaggtgactcctactttttcttctgctccaaggatgctgttagaagggctacttactacctgagagtctttgtctgccaactacaactacactggggaaataaaggagggaggtgtgccaactctccaagaattttttggctgtcaaatagcacatctggacaatccgggctaggaaaaacaagcatgcacactcatttcttttaaagtcaagctctctaggctggaatgagccggacactgctctcaagaaccatttcctaaaccgtgcctgctcattcccagtcttcagaggtgtgtggtcccctggcccattacttccactaagagatggcaagggattcatagagacctcctgaaagcaaggtcacaaaagaccccagaatctggccaagagacgccctaaatttacaaaccattcattgcaccatttgtcaggtttaatcattaatcagaaggggtccaagacaaaaactaaagccacgcccagtcccatttaccagctatgttgacaagtgaccgcccccacccctgacccccaacaaaccatcctgttcaaggacccaggcagagttctgccaggggtcacacctgaacacatctcctctaagaactccttgagactgtggcgccagcgcgtggcctagtctccatccccatgatatgaattccttctggacaaggcagttgtagttcaatctagaaacatccagcctctgttcctgccgatggaaggaaggcgttcctggtggggatagccgggcgggcgattcgacttctaggacagaggttgccatccagtgggagggtctgtgcctggccatctataaatcccccaccttgcatcagagtcctggagcctgctggagtactgggtctcttctaccacgctgcctctgtgccactgggaagttcagtagcactctcagggacccttgtctccagtcctcaagacctggagctctcaggaaaagagtcaggggccgctgtggggtcttttcccaaactggcctttgactgcccccctcccccgccgtctgctagctttgtaaggcagtcaaaacagagctagaggccaaggagccggacgggaagcccggccgcctcgcccctccagcgggccctggccccctcctctccgccaggcctgccctcctctttcccacttctctcctcaccctcacctcccccatccccctctcatttcctctggcacccgggctcgcaaatccctcatccgaagcccggtttccaaccaagagtgggcactccaactcacttcctcctccccactactctccaatctcaatctcctctgctcccttcgccctgccccccttcctgnnnnnnnnnnnnnnnnnnnnnnnnnnnnnnnnnnnnnnnnnnnnnnnnnnnnnnnnnnnnnnnnnnnnnnnnnnnnnnnnnnnnnnnnnnnnnnnnnnnnnnnnnnnnnnnnnnnnnnnnnnnnnnnnnnnnnnnnnnnnnnnnnnnnnnnnnnnnnnnnnnnnnnnnnnnnnnnnnnnnnnnnnnnnnnnnnnnnnnnnnnnnnnnnnnnnnnnnnnnnnnnnnnnnnnnnnnnnnnnnnnnnnnnnnnnnnnnnnnnnnnnnnnnnnnnnnnnnnnnnnnnnnnnnnnnnnnnnnnnnnnnnnnnnnnnnnnnnnnnnnnnnnnnnnnnnnnnnnnnnnnnnnnnnnnnnnnnnnnnnnnnnnnnnnnnnnnnnnnnnnnnnnnnnnnnnnnnnnnnnnnnnnnnnnnnnnnnnnnnnnnnnnnnnnnnnnnnnnnnnnnnnnnnnnnnnnnnnnnnnnnnnnnnnnnnnnnnnnnnnnnnnnnnnnnnnnnnnnnnnnnnnnnnnnncgctggcggtcctggagtcgctcggggcagtggcccgggggatgcaacgtggaccgcgcgggactgccgtctgcatcgccgccgcgcctcgctgccccctgcgctagatccagcgccccggtgcgctgcctatcaggagctgacgctgcgtcccgctacaccaggacaccgcaagcctagggagccccgcgagctgacgaagggtggtcagaccctgactttatttttagtgggccgtgcggatttggtctccgacagtgctctctccgcgggcctccttctgtgcgctcttggcgccggcgatggggagacggcggcggttgtgtctccagccctacttcgtgtggctgggttgcgtggcgctctgggcgcagggcacagatggccagccccagcctcctccaccaaagacgctccggccccagccgcccccgcaacaggtccgacccgcagtagcgggctccgaaggtggcttcatggggcctgagtatcgggacgagggcgcggtagcagcgagccgggtccgcaggcgaggacagcaggaaatactccgagggtaggtgggcggcgggctggctggttcgtgcggggacctaggtttccctttactccacgccctccctgactgtcctgctggccggtagagccgctgccctctccacgaaaacgcttaaagaccccaagagctccaggagtgcccctcgttttactcccgagcgcctcaattcctctgcggaaaaccctccctgggggcttctgctggctggcgatggggaatcgggcccttggttgtggatggcagagcatgtgcaacgtctgtggctctgggaaagtttctcagtgtcaggccgaaggcggacatgggtctgccctgctctggggccccccccagagcctgcctgctccccaccatcgggggcgcagctctagagccttttgtttgaggacgtgtgcgagggtagcggcttgttctgtaatcgccagctccagcactccaccttctgagtagccttccttgacacttaagagccagggacaaagttaatcaaggaggaatggatttgggaacaagggcaaggatttttgaacggagtgccgctattgttctcagcatccagatgctagaatagcagcaaattatgtgtttctcttcttttcccagtttaaaaaggcaagcaaaagagagcagatgaaaggccgtgtttagatgttccggaccctcccccattccagcttctaacccatctgcttcccaaaccccccaaatgtgaagtagagctttgatttgttcgttgtcctgaagtctactcgctctggctttgcttaccaaggcatgtgtgtgtgtgtgtgtgtgtgtgtgtgtgtgtgtgtgtgtgttgctgcacccaactttacatgtatcaatcaccatgtttgtcctctacaggcccaacgtgtgcggttctagattccactcctattgctgcccaggatggaagacgctccctggaggaaatcaatgcattgtccgtgagtgttgggcagggcacacaggctaaggcagcgcagcatactccgagtggctccatttcagggctgaccttatactcagtgcttgaacactagcttgcctgtacaaagacattggtcacaccaccctggtaatgagacctcagtggtgggagggacgctgcatcagctgagacttcattaacagaaacctggaaggcagatatcgatgaatgttttataatgctccgtctccgttaggtggtttaccatttgtgtagagacacaaacgggggcggggggccttagtgttcaaacaattccctagataacagaacataacctcttgaaaattccaggtatgaccatagtgctactatggtcatgcttggactcctaggttggccatcagaagatcagtcttaagtctttgtaccacattctcatctgtgggttgttcttagcagccacatggcaaaggttttaaaggagtactcacagatttttctgaactgacctaaagtttaaagaactgttttgttttcaagagaaataatctaagttgcttgactctttttgtgtgtgaggggacagtcaagcttagaatccccacagaccagatcttatagtggacagtatgttttctcagacgtgactcttacacctcgataatgtcagtgtgtcagaacgtacaggctggaattatgagcagtaatagtaatatttttaaaaacaatattccaaaatgtatatatggaggtctccaagttctaagtggacagacagctcattagtttcttgggttatgatcaaggacccagggaggtcttatttcagtctcctgaggtgaagtatgataggtctttcccctgtgtgtttttgtagcccagacacatttgtccgttctggaggatagccaggtcacaggcagcacatgcatttacagtccgtcttgactttagactgaccttggtgttctggagcggaaagataattatgtcactgtgaacaccaaaaaggcaagctaccctagccaagggtattgtgggtatggtggcatctccagctctgtatttattggttttgtgggtttgagacagaccctaaatgctattttctgttctttaaaaggacagaagtctgaagttttattgtgaagattggttttctctttcccttctatccaaaaatcccacaacctctagtaatcaagcaaaaaaaaagaaagaagaaagacaaaaggaaggaaggaaggaaggaaggaagaaagaaaggaaggaggaaagaaagaaagaaagaaagaaagaaagaaagaaagaaaggaaggaaggaaggaaggaagnnnnnnnnnnnnnnnnnnnnnnnnnnnnnnnnnnnnnnnnnnnnaaggaaggaagactgggtcctttcagatgatcaattcataaatattttaaatacaccttccatgaaagtagggctttggctttatttaaaaaaaaaaaaaaagatagtcacttgtcttctatccaacatctcctatgtgaagtatttatagaaggtgtgttactctttcaggccactggggcattactgtggctgtctcacactagcaaggtctcccagactctggaaacagctcccatcactcaccacacacctgccacactagctgggaatgacttaggccctgtggaaagtctgactcactcaacataatgaatgtgactgccattattgagttggagagcagccgaggagaagggataggtttatggtacgcactgaaaatctgtagagtcaggttttattggactagtcaggaatgggaattccagagagcaaagcctttcagcatagttgtggtaggagtgtatgtatggcccagtgagtgtccactttagctgctctgggtctttgactatcactgtgccatttccttctttaaaagatcaactttgagtacctcacagtgagtattgtcacccgtgtttcttctacttgaaatatttgggtgctaatgggttgcattaggcaaaccttgcctgagattatgttatatctccaagaaaatacttacgatatttatgtcaagtgttgctaagtaatatttattattaacacctttggaaaataactggcacacttgagagtataaaacttaggcataaaatggacagagaggatgtgctgtgaggtgcccttcctcttttcgcatatcttaagaaggtcacatgtgaggaattaaggaaattaaaaccattgcagatttaaaactaggaattttaatcactgtattttttttttgatagcaagtatttctttgttgaattcacttatatttcattatgaagcaaagacaaactctgaggtaatttataaataatgataatcatatgaggaccaatggttgttttctcatacatttatatctctgcattctttttagtcaggccaaacacgcttcaaagtttaatgttcgttcaactcttagcaggcttcacacaggaagacactaatgagatatgtctattattgttaaagcatgatgccttacgactctattctcttgttccttatgaatatttaattagtagtatttaaagacaggatctctagctagtcccctggaatggaatgaactgtgtcacccaagttggccttgaactcccaggttctctttctggcattcaagtgctgagattacaggcttgagccaccatgcccagctgttattattcttaattgtggcttgagatgtcattgaagttcttccaagtttccatgtttgtttccaaactgactttctagctttccgtaaaaaacaaaacaaaacaaaaaaaaaacttaagaaaattatcttagaacatgaaataattgaagaagagttgcttgtgtatttatttatgaagaaactatgccatagtgtaaagcaatgggctgggattggctcagcatcatagcctttgagaactgaaaaagacagctacagtatactcgtgtaaataaaataaatagatctttaaaaaaagaaccttttaatataacccctttaatatatgttctgatgagaacactgagcctgtagaagttttgagtgtttcctgggctcattggtgggtcattggcagcatgagcactcaacctcacagtgctcatgtatcctattttaaataccagctcactcatcttctcctaacatgctcacactctcagagtggacatcctgtctgccattctaatcccaacactgctaggctcaatcatttcagttaaaatggaacacctataatgagacctcagactgaaatgaacacagggaagaaggagtccattagtcttgctttctcctgtcctgtgtgcagtacacacactgaagccatgacagacaattaattggccaggctccaccccctttaattctattttggtttgggacctaagtgaggccacttcatctaagcctagattctcaagcctgctaagaagacacctttgaaataaaactatctttttttttctttttttttattacgtattttcttcaattacatttccaatgctatcccaaaatgagcatatttcattgaaaaaattagtgatcagaaacaaatacattttaagtattctgtgatggaagccattttcttgtcccctccctgtttttttttttttttaagtcttaagaacataatattttcgcagtgttttcgttcaggaaaacttgttgaagccctgtccgtatcttacagatgctaaaggggatctaagaaagggaaagcaattactaaatcggtttgctcctggaaagagtgttcctcacattattggaggtcccaggtctctttgaaagtgttgagacctctctcgagattcatgtgcatgttgctgtaaatacttagatgtagtttcagggcattcccaggtcgttctcctatttcctgcatacagagacagagcaagtcagcacacagcctttgtgctcaaagagggaattcaactgaggatagagataaatctttcagctccttaatggcctggctaaatttgggagacagttcccattccagagcacttgactgtaggttttgagtatctgtggtatgtgctatgtcagtgagcctcatattcttgaccctccaatgaccctctttttcactagaggtcacagctgtaggaagcttcgatccccacccctgtcataagggctttttggaacagcagaaacggactaggttgcattgatgacgtagcaggagactagaggaaggagagaaattatgaagggggatagaataaagattgatgacagagtagggcagaagccatctgggatggactgtgcagggaacctgatatttggccaactcaggagggcctggggtttcttgtttctaccaattttacattcttacacagtgggctatattttctacgatgttcagtctctctgggtttcctccccactgccagctccctgaggatctagacttcctccttcagtaaatcgtgaattcaaaagattttagttttgaattaaaaaaaaaaaaagaaaaagcaactttcattgataatcaagttaaagaaattggtgctaattagtatgatagaattgaagagagttacactgatatatcatcacaaggaaattgtaaaatgtagtgccatgtctttactgggtgattttgtttcatgctgaaaaaccagacttttgcaacattaattccatatccttatctccccatcctatggcttgaaaatatggctttcatactgtgaagcacgacggagggtgttgacagtcattgcctcttgtgttgtgttgtctgcagccatttgcaggaacagttgtggagatggattctgttcccgccccaacatgtgtacttgttccagtggacaaatatccccgacatgcggagccaaatcaagtacgttccctctctggggctatacttgccacatttttcttaaacccacgaaccagtgacaagtgtcctcctcaaagaagatagggattggtgattgttctcactcaccaggactttgttaagttttgaactaagaccatcttagtgcctcagctgttgcctaatcctcaacagaaactgtgtgtaggtagtgggactgttcagagtccatgaagtcattcatcacaatagctgtaacttcctgagcttttggtactcacacggttctatgtgcagcgtttcaagcctctcatcaacattatttgatactgatgtggacccattttgcagaggagggaagcgaggcacataatatattaaatgactactgtcctgctttgatgtctagtgctataataaacatcatgaccagaagcgacttggggggggggaggatttattttatcttacacctcctaggcaaccttctatcaccaagggaagtcagaatagggactcaaggcaggaacctggagtgagaaactgaagtgcaggccatagtggaatgctgccggccagcttgctcacatggcttttctatctcttttctttaccacctggaaccatctgcctaggtagtagagcccatcatgggttgggcccttccacatcaacaattaattaatcaagaacatgccctgtaaggttttcccatggacacagtaccccagatgactagttcgtatcaaattgacaaaaagctaaccagctcatttatgcaaggcaacacagacttgaatctactgactaagaatgactcggcagggagtcccaaacactaacctgtatttactgccttttgtgtacagcctcaatttagtcttagctatgggaagagaagaagattagaacaacagatatttactgaaatactgaccaactactttatatgtaccaagccactttgctacgcatacaaatttttaacagttccatgaagataactatagcagtagacgaaaagtgtatttttttaatgatgctttctgttgagactcccaagtccaagactgattgtctgtgttaagtgtttaagatcacactagataagacagaagtgaccctaggtaaggcagaaatgatattgcttctttaactgctcaatatctaaacgagggctttaaatctgcctcttaaaatgagcatcgtaatagttccctccacaagtttatgttccacaagggtgatatagagcatgtctgatccaggaataagagtcaaacaatgcacaccggtgtgtgtgtgtactctgatggaccatcgacaagagcctctgggtccactgcttccaatagtctatgttttacctgtgatttgaaacttaacgtccaaacacacaaagactttgaatgccctcaggagtgcacttcctcctgccccggttgtctgccagagacctttcctctgtgccttcatgatttctcgatttgctcacacctacccttggcactacaacaaagcataaaccagagcaatactgctttttttttccaacttaataatcttgttgattatttggggatttcacacaatgcaccctggccacattcacttagcagtcttcccagacctcctcccacccttgtgacctctcctcaagaataaaaaaaaaaaatacaaagtgcaatattgcttcttaaaacccagacctgaacaagaaacactatacaaggtactgggttatgtctggaacacacacacacacacacacacacacacacacacacgcacatacacacactcatttggactttagagaacacctacttccttaccaccagaaacttttctagcccttccaaccttcaccctacttgaacttgctaaagcttttttagcagtatttatcactaattgcctgaaacactttcttgtgtgtttgtgtgtggggggtgtgtgttcgagcacatgactgcacactcatttggaggccacaagttaacctagggcatcattcctcaggtgcagcttatctctaaagtgagacttaattcatggctgaccacagtctccatgtctgcaggtgcttcagcctcggcaggtggccacgtcatccactcagtgcttacatgactacagctttcctttttccactttccttaaagtaactccttaagtatgtgggttctactacacaatgtatttcaactctaccattttacattctgtgcggttcgaaccatcctcatctttcaccagactgccttgcacctgacatctttcaatcccttctctacagagcagtttctcctttaaaatcaaatatcttcactttcattgaaatcctttccttctctctgcaactggaacaaaccaagcctttggtggacaagaaacccaccttacctgactggcctggcctgcctctccaagacaccgtctatatcagttctttggaggaaaccctaaaagcatcctaagatcgttagaggttgagttgttaaccctaaaagtgactccttgcctgactgcttctcatctttcaaagttcagtccacacgtcacataaaattgggnnnnnnnnnnnnnnnnnnnnnnnnnnnnnnnnnnnnnnnnnnnnnnnnnnnnnnnnnnnnnnnnnnnnnnnnnnnnnnnnnnnnnnnnnnnnnnnnnnnnnnnnnnnnnnnnnnnnnnnnnnnnnnnnnnnnnnnnnnnnnnnnnnnnnnnnnnnnnnnnnnnnnnnnnnnnnnnnnnnnnnnnnnnnnnnnnnnnnnnnnnnnnnnnnnnnnnnnnnnnnnnnnnnnnnnnnnnnnnnnnnnnnnnnnnnnnnnnnnnnnnnnnnnnnnnnnnnnnnnnnnnnnnnnnnnnnnnnnnnnnnnnnnnnnnnnnnnnnnnnnnnnnnnnnnnnnnnnnnnnnnnnnnnnnnnnnnnnnnnnnnnnnnnnnnnnnnnnnnnnnnnnnnnnnnnnnnnnnnnnnnnnnnnnnnnnnnnnnnnnnnnnnnnnnnnnnnnnnnnnnnnnnnnnnnnnnnnnnnnnnnnnnnnnnnnnnnnnnnnnnnnnnnnnnnnnnnnnnnnnnnnnnnnnnnnnnnnnnnnnnnnnnnnnnnnnnnnnnnnnnnnnnnnnnnnnnnnnnnnnnnnnnnnnnnnnnnnnnnnnnnnnnnnnnnnnnnnnnnnnnnnnnnnnnnnnnnnnnnnnnnnnnnnnnnnnnnnnnnnnnnnnnnnnnnnnnnnnnnnnnnnnnnnnnnnnnnnnnnnnnnnnnnnnnnnnnnnnnnnnnnnnnnnnnnnnnnnnnnnnnnnnnnnnnnnnnnnnnnnnnnnnnnnnnnnnnnnnnnnnnnnnnnnnnnnnnnnnnnnnnnnnnnnnnnnnnnnnnnnnnnnnnnnnnnnnnnnnnnnnnnnnnnnnnnnnnnnnnnnnnnnnnnnnnnnnnnnnnnnnnnnnnnnnnnnnnnnnnnnnnnnnnnnnnnnnnnnnnnnnnnnnnnnnnnnnnnnnnnnnnnnnnnnnnnnnnnnnnnnnnnnnnnnnnnnnnnnnnnnnnnnnnnnnnnnnnnnnnnnnnnnnnnnnnnnnnnnnnnnnnnnnnnnnnnnnnnnnnnnnnnnnnnnnnnnnnnnnnnnnnnnnnnnnnnnnnnnnnnnnnnnnnnnnnnnnnnnnnnnnnnnnnnnnnnnnnnnnnnnnnnnnnnnnnnnnnnnnnnnnnnnnnnnnnnnnnnnnnnnnnnnnnnnnnnnnnnnnnnnnnnnnnnnnnnnnnnnnnnnnnnnnnnnnnnnnnnnnnnnnnnnnnnnnnnnnnnnnnnnnnnnnnnnnnnnnnnnnnnnnnnnnnnnnnnnnnnnnnnnnnnnnnnnnnnnnnnnnnnnnnnnnnnnnnnnnnnnnnnnnnnnnnnnnnnnnnnnnnnnnnnnnnnnnnnnnnnnnnnnnnnnnnnnnnnnnnnnnnnnnnnnnnnnnnnnnnnnnnnnnnnnnnnnnnnnnnnnnnnnnnnnnnnnnnnnnnnnnnnnnnnnnnnnnnnnnnnnnnnnnnnnnnnnnnnnnnnnnnnnnnnnnnnnnnnnnnnnnnnnnnnnnnnnnnnnnnnnnnnnnnnnnnnnnnnnnnnnnnnnnnnnnnnnnnnnnnnnnnnnnnnnnnnnnnnnnnnnnnnnnnnnnnnnnnnnnnnnnnnnnnnnnnnnnnnnnnnnnnnnnnnnnnnnnnnnnnnnnnnnnnnnnnnnnnnnnnnnnnnnnnnnnnnnnnnnnnnnnnnnnnnnnnnnnnnnnnnnnnnnnnnnnnnnnnnnnnnnnnnnnnnnnnnnnnnnnnnnnnnnnnnnnnnnnnnnnnnnnnnnnnnnnnnnnnnnnnnnnnnnnnnnnnnnnnnnnnnnnnnnnnnnnnnnnnnnnnnnnnnnnnnnnnnnnnnnnnnnnnnnnnnnnnnnnnnnnnnnnnnnnnnnnnnnnnnnnnnnnnnnnnnnnnnnnnnnnnnnnnnnnnnnnnnnnnnnnnnnnnnnnnnnnnnnnnnnnnnnnnnnnnnnnnnnnnnnnnnnnnnnnnnnnnnnnnnnnnnnnnnnnnnnnnnnnnnnnnnnnnnnnnnnnnnnnnnnnnnnnnnnnnnnnnnnnnnnnnnnnnnnnnnnnnnnnnnnnnnnnnnnnnnnnnnnnnnnnnnnnnnnnnnnnnnnnnnnnnnnnnnnnnnnnnnnnnnnnnnnnnnnnnnnnnnnnnnnnnnnnnnnnnnnnnnnnnnnnnnnnnnnnnnnnnnnnnnnnnnnnnnnnnnnnnnnnnnnnnnnnnnnnnnnnnnnnnnnnnnnnnnnnnnnnnnnnnnnnnnnnnnnnnnnnnnnnnnnnnnnnnnnnnnnnnnnnnnnnnnnnnnnnnnnnnnnnnnnnnnnnnnnnnnnnnnnnnnnnnnnnnnnnnnnnnnnnnnnnnnnnnnnnnnnnnnnnnnnnnnnnnnnnnnnnnnnnnnnnnnnnnnnnnnnnnnnnnnnnnnnnnnnnnnnnnnnnnnnnnnnnnnnnnnnnnnnnnnnnnnnnnnnnnnnnnnnnnnnnnnnnnnnnnnnnnnnnnnnnnnnnnnnnnnnnnnnnnnnnnnnnnnnnnnnnnnnnnnnnnnnnnnnnnnnnnnnnnnnnnnnnnnnnnnnnnnnnnnnnnnnnnnnnnnnnnnnnnnnnnnnnnnnnnnnnnnnnnnnnnnnnnnnnnnnnnnnnnnnnnnnnnnnnnnnnnnnnnnnnnnnnnnnnnnnnnnnnnnnnnnnnnnnnnnnnnnnnnnnnnnnnnnnnnnnnnnnnnnnnnnnnnnnnnnnnnnnnnnnnnnnnnnnnnnnnnnnnnnnnnnnnnnnnnnnnnnnnnnnnnnnnnnnnnnnnnnnnnnnnnnnnnnnnnnnnnnnnnnnnnnnnnnnnnnnnnnnnnnnnnnnnnnnnnnnnnnnnnnnnnnnnnnnnnnnnnnnnnnnnnnnnnnnnnnnnnnnnnnnnnnnnnnnnnnnnnnnnnnnnnnnnnnnnnnnnnnnnnnnnnnnnnnnnnnnnnnnnnnnnnnnnnnnnnnnnnnnnnnnnnnnnnnnnnnnnnnnnnnnnnnnnnnnnnnnnnnnnnnnnnnnnnnnnnnnnnnnnnnnnnnnnnnnnnnnnnnnnnnnnnnnnnnnnnnnnnnnnnnnnnnnnnnnnnnnnnnnnnnnnnnnnnnnnnnnnnnnnnnnnnnnnnnnnnnnnnnnnnnnnnnnnnnnnnnnnnnnnnnnnnnnnnnnnnnnnnnnnnnnnnnnnnnnnnnnnnnnnnnnnnnnnnnnnnnnnnnnnnnnnnnnnnnnnnnnnnnnnnnnnnnnnnnnnnnnnnnnnnnnnnnnnnnnnnnnnnnnnnnnnnnnnnnnnnnnnnnnnnnnnnnnnnnnnnnnnnnnnnnnnnnnnnnnnnnnnnnnnnnnnnnnnnnnnnnnnnnnnnnnnnnnnnnnnnnnnnnnnnnnnnnnnnnnnnnnnnnnnnnnnnnnnnnnnnnnnnnnnnnnnnnnnnnnnnnnnnnnnnnnnnnnnnnnnnnnnnnnnnnnnnnnnnnnnnnnnnnnnnnnnnnnnnnnnnnnnnnnnnnnnnnnnnnnnnnnnnnnnnnnnnnnnnnnnnnnnnnnnnnnnnnnnnnnnnnnnnnnnnnnnnnnnnnnnnnnnnnnnnnnnnnnnnnnnnnnnnnnnnnnnnnnnnnnnnnnnnnnnnnnnnnnnnnnnnnnnnnnnnnnnnnnnnnnnnnnnnnnnnnnnnnnnnnnnnnnnnnnnnnnnnnnnnnnnnnnnnnnnnnnnnnnnnnnnnnnnnnnnnnnnnnnnnnnnnnnnnnnnnnnnnnncattactatgagaaattcatcctgtctgtctgtctgtctgtctatctatctatctacctatctctgtctttcctctctctctctctctctctctctctctgtgtgtgtgtgtgtgtgtgtgtgtgtgtgtgtctcgtgtctatgggtctcattgtttacacatctgttgatgaactttaagttcattcgtctcttggctgttgtgagtgattctgttgcaaacaccattttataaaaacctgtttgagtcctgatttccattcttagaatatctactcagaaatggaatctctgttttcagagtttttgaggaaatgctatattgttttctgttacagctgcaggagttattcctgacacgaagcaaaagggcccaggttgccttgctaaccctgggtgctttttttttcttttttaatgaaaaccactctcataggcatgaagcagtattacactgtggttgttctagttatttttttaaatactgtcttctaggtgtagttgtcgcttcctgaacaatgctacaaagatgttagacaatctgaagaaaggcaaacagtctatattctgctaaaggcaggaatagaccaactcgaagattagaaaatacatattttagtgtctacttttgtgttgttacaaagactggactctgtgtaaagatggccacaggcttgtgttttctaaaggaaagttagggggacataggtagatgggaaagccagacccttgtgatggtggcttcttgttcccagaatacattgcaagcagaacctgcttggagccattatctaaactggaccaataaggggaaaggaaggaaccaggggcccttccttaatcaccttagacatccagcccagaatctgttcagcagaacccaggcctagggttcctcccatccagaagggatgcttttgctttcaaaggcagctcagtgttctatctttcctggatgttcaattctttgtccaccccccagggaatgagcaattccccattgatgatcaatgacaccccattacaatacatgggaactctcactcaaggttgcatacctgcccaaaattcagagactcagaagtggctgctctttgaggacctcttctgagagggcaaagcacctacacacataactaccaaggacggagctgccactcagtcatcacgaaggctagcattggagtagacagagtaggggattgggtgcttttgtatcaaggagttttgatctcttatggctagacagatatttctcccaggagatagtagaggcttctgatgctgcccctaagccaagagatagggcatgccaaaccccaaggacccaattgttgtccaaagaggaaggctggggaggacctttcactccatatgcttgggaaagaccatggagaaggtcacagtgctcaatggcttcttacttcatacacagctcttaggtccctctgctgtgagtaactcaagggtcagcatctggttgtagggggatgggaagacttggtcggttctattttgaacaattgcagtgtgtaggcaaaacctgaagtaatttttaagtttctgatgtcaagtaaaaaggtattgcccagcttgctgtaagttgaggtggagcatgcctgaaattcaaatcgaggctctgagtgagctagggggagtgttctgtccttgtgtagtcaacgttgtctgagggatgacagctctttcaaatacccccctgcatgcacacaccccttcttctgcccaggacctcccccgccacacccatgttgtatacacaaagctctttgctggccttgtagaaaaccctggctcctggagatccccaagctgatggaggagtcaggaaagagaacaaagaggcactgactgtggagatgtgggtggggtccagaggcagaaagcttgtctagacagacagggtcctctggtccatccctagcaacagagcagtcagttatggaagaaagacgttggaatttaagagttttccccatctgtgtgtttctatcactaacatggcctggtaagttcatgggaattggcagaagcccaggttcaggtgctagacaagctatcatctgtagcagcttggggcaaagaaggaaaagactccttggctagagatgaggactccacaggccttaatacctggcctttctgcccggaatcttcaagtctccctttctctctctctctctctctctctctctctctctctctctctctctctctctctctctccctctccctctcccccctctctgtctcgcgagcgcgcatgtgcgctctctcacgatctctctccttaagatagaaacattctttccctcctgtttttcttgtctctttctgcttgttgtggcattaacagtcaaagggggaaaaagcatcctggtgttctctagagacagggcgcctgcggtaaattgcttgccctgagtatttttcaatggtatatcttacccaggctagataagattaaggttttattaaggtcacagggtgccaaagagtcatatcatatcagcaaaggcaaatgtgaacaggccctgccttcttcatgatcactaatgaggaaggtgtccatgcccaggttggtaatgaactgtgttctcagacaggcacctactgttctcatgatcgctcgggataagaggagcaggagatggtacatctctggagcaggctctggagaaggagaccaaggggaacatctggaagatgttctaacatacatcgttttgtcttttgttatccagtgctgactgttttagcatatctaaccagatgaaagctctggagagggagaccaaggggaacatctggaagatgttctaacatacatccttttgtcttttgttatccagtgctgactgtttagcatatataaccaggtgaaagtcacaggtacttctcctaattcaactttctgttctgaaagggagagcgtgacgtcttctttagaaccattgagcagagcagagcatcaaagtgattgtttagagcacttcttaggactgtctttgccctgtttgcagcctgaattcagtacccaggtatacttggggtgtctagaacaatcagagggtgtcttgtctgtttctaacccacaaaggagcagctatggagtgaaaagcccctccctggtagaagagtattctgagcctcgcccagcccactgtcaaccttactgatgctatgctgtctagttggaggaatccattaggtactgagttgccagccaggatacatgcaaacagctctttcctgagtctcataggatggatccttctgtctgcctttgtcacagggacaatagaacctatggtacaagcaatgccttagcctataaatccagtagttagcaaataaggtgagggtggtagctggtagacaagagggacaggaagagtttaatgttttcttctaagttgtcttatatggctgagagtgaagatggagatgacaatttgcagtttctgaacccagaaaaacccttgaaatatgatgtttggtgacaggagggccaggaaaacatttaaactctgttaaagcattgcctaaaatgtcagcagcgatttttagggacgtcactgtgtgtccttccctctacagggcacagcaatattgctcatttagggaagaggactaataggtaaatgaacaggtgagagtctatgctggctagtttcttgtcagcttgacataggctggactcatcagggaagagggaacttcaactggggggttgctttcatcaaatgctgtaggagaatctgtggggattggtgactgataggaagggtccagctcactgtcataagtgccactccccagggctgaaggtcctatgctgtataagaaagcaggctgagcaaggcagtaagcagagttccttgatggtctctgctttggtacctgcctccaggttcctgtcccagctgtgtctcattgtgaactatgagggtctataagccactttccccaagtttgttttggtcagtgttttactatagcaacagaaacctaagttgggtgtaatccagtgtaaatttaggtagtgagaaggtctagggtgggaagacagggaatgagaatttgcacacaggtcgcagtctctgtgagcgtgtgagaaaagcattctgggtccttgatatagctgtctcttgtgagactaggccggggcctagcaaacacagaagtggatgctcacagtcaactattggatgggtcacacggccaccaatggaggagctagagaaagtacccaagtagctaaagggaactgcagccctatatgtggaacaacaatatgaactaaccagtaccccggagctcttgtctctagttgcatatgtatcaaaagatggcctagtcggccatcactggaaagagaggccctttagacttgcaaacttaatatgccccagtacaggggaatgccagggccaaaaagtggaagtgggtgggtaggggattggggggtggggtgagtatggaggacttttgggatagcattggaaatataaacggggaaaatacctaatttaaaaaaaaagaaaaaaagaaagaaaagcattctggacacaaggaaaagcaaattccaagacgtggcagaaacagactccatggactgtgaagacagtgatgggacctctgtggctggagtgagacagagacaaagggacaatggcaggagacagatctagacaggaaggtttggcttagtagaccaagggaagaaacttgaatgatctctcaagcatgatgggaaaacaatgatttttctatggtcaagtgtctcagttagggtttctgttgctgtgatgaaacactgtgaccaaattgcggatgaaagggtttatcggactgaagctcccaactcacaattcatcactgaaggaagtcaggacagaaactcaagcagggaaggagcctggaggcaggagttgatgcagagaccatggaagggttctgttcactggcttgctcagcctgctttcttatagaacccaggaccagcagcccagatatagcactacccacaatggactggaccctcccccccatcgattaccaattaataaaatatccttcaagcttctctgaagcctgatcttgagacattttctcagttgaggttccgtctcctcagatgactttagtgtctgtcaagttgacttaagactgcccagcgcatcaagtgctgtgatctgattgacattgtttacaaagtcaccatggataccttgttgacactgcttggcttgtgaggggggcaggaaggaagcagaggaggggatggacacaggccaccatggccgcaaaagcactggtgacatggtgacagtgcaggccacacttgtggtctggaagtcatttgtggtccaggtgtgatgagttgaaaaaaagaaaaagaaaaaaaattacagattgagaattatcagtggagcctggctggctgatataccatttgatgatgtgggaacagctgacagggaggctagatgggcagagactaatggagatcaatcactgtgttaggtctagagatctgttggacttctaagtgcactcgcctgtgaacacagttcaaaggacagacgtcaagacagggccataaattggatgtatttggattaaaattccagctctaatattttaatcataagtatagacaataattaggatgttatagacaaaaaaaacagacttgaagtcagagccttaggtgacctcaacattttgatatagtcaaaggaaaggggtctgaaactttgaccgggaaaataggttgagaatggacagccctgataccctggaggcaaagtccccatatcaccttatgctgtcctgcatcagggaagtttatttcttcttttaggcatcttaacatggctgagaatgttatttttatgtgagatgtctgtagaagtcacagccacaatttcagactcaactggagcggtacaggagtctggctcacgagaaaatgtgcctgtcatgtgtcctcgcacagagcaggtgctggggccatgtctgacatgaagtgttctttaagcaaccaagctcctccggtaggcgagcgtgctctgctcgtcaggctgacaccaagcagtgctcttgctgcagatgtcatgttcctgttgcagaggtcgctggcaggtcagacagcagcttctgttcctgtggagtctgatctaccctccctgccctcccctttgcacccatgctaggcacaggcagtttcttcttagtgagtggccagaatttcttgcagggtagaaatctgaatgcattcaagtgtcttccaagcagtgtttcaactgtaaagtactatttccagattcatttgttaccaaaaaaatattaatctatagaatcatacctccctcaaaagaagaaaatgaccctgttttatgttgtgagtgtctatgctccatttggactttctgcttctcttttgttgtttctcttcagtgtaacaagtctcctatgtcatgcttgtgttctataccaaaataaaatggcagttaagaatacagaaaaagaagccacgtgtggtatgcatgctcttaactccagcacttgggaggagaggtaggcagatctctgtgactttgaggctaggcaggactataaagagagaccttatctctaagcaaataaacaaacaaaccagcctccattaaaaaaaaaatcaccctagggatataaagaagccgtattatatctttggccttgcttgcaggtttacataattctcacaatactgtgggctgggaaccacccactgttgtgagcaggcgtgctgagaatcagggaatttaagtgctggagtggaggagagggcttattgctcatacacccgtatgcctggcaatgtggcagaaaaaggtgttgagaggggctgtcacagggcagggttacatcagtaaccctggtgcatggaaggagggacttaaatccagctaactcttcctcttatgtgattgacaggctcaggagcaaatgacttgcagtgcaatgggcccaagtctttctgttcccaggacccttatcacagtgttagaaatttgacatgggaaatgtaagaactatttgctaacccttttttttttggcgtcatgttatttggtgtcaacccatgtcatatgtccacataaatattttatgagcaataattctactttctcaccctccaaatatactgtgaagaaatacagaggtattagtctaaccctgataaaatttaggctagtgttacattgtaagtggccagtcttggcaggagaagctgaaccttcatcagcactatcttcctgtctgggtttggagaactcaaaaacagctagcttatgacttccttataggtcctaagcatggacagacagattgtccccatttgtctttgtgatttgagggaatgttgcagatgtgcctgcacctggaggatggagattgtcaaatgcctttcctagatcatttacattttggggggggggggtggtgtctcactgaagctgaagccgccattcagctacggtggctggccagggagctccaggaatctgtctgtctccatctccacagtgctaagatcacaggggcaccaaacttttttgtatggatgctaaagtccaaagtctggtcgtcgcacagcaagtattcctggctgagccatctcccctgccccaactgtatcttttccaaagactgatacagtaacaagaggctgggtctgggaaagtggctgtcctttaagctttcttccacttgatacatttaaagaagattccttgcattttcattaatcacattcaattagagttatccttctgcaaagtatgcgttgggcagttgggacatcctccatccaaatctagtaattgtttacaattgagccttcaagtactggccgttggttccaagaattacacactccttagagatctctgggaagtttctgttccatttgacattcctgtccacccccatctttattcccccttttcctgacctttatgtttacccatctaactgttggccagctttggttttcaatgtgatggcgtgtcagaagtgccgcttagaaacataatgtgttatgtatggataaagaagcagggggcgtggttcctggggagacacacttctccagagccgtagagcatcatgccttgcaggaaaaggacaactgcaagaagtcaccccgaggttactgacactgatgctttaacagggagaaaatattttcttcccaatgattgggaggcagcaatcacaccatatgctctggacagtggtgatgggtgaggaaggagctgggtggctgcaccttcagcctgtgcctgcacttcttgagagtcttattttcgacgggtacctcactggaaaagcatgtgaatgattttgtccccttatgttccagtagaaaaagtgatcaagcagtgaatagtgatcttctgactctgtgagcatcagacccagccaatctgatgcattgttgaagcatctccatccgaccaatcagatacattcgcttgtgttttagagaagcgactggatataagatgtcttcttgacagtatcgttgcaggatcttgctgtgcatggattaaaggtgctgtttaataagctgtctcttggtgatcttttttttttttttaatgtgtctgcagctgtctgtgagaatggatgccagaacggggggcgttgtatcggccctaaccgctgtgcttgcgtttatggattcaccgggccgcagtgcgaaagaggtaagagggaaggagagactgcgggagttaaagtttcaaactttattctgtaacttttaatattataatgacgaatgcacgtttttgctatccagtgagaactggtctagtgaaatgtctattgttttgctccagtagcttgaatggtaagatttggggcagcaagcatatcagtggttttcatgacaatgaccctagtctgagaagccagttgagaagtagtcgcttcagggtgatgttagcttactgacccatggtagattctcatcatgttcatttattctctggacactgttgggaatacaccctctactgtagatgatgatgatggtggtggtggtggcagcaatatgtccctggctgaactccacaaaatccgacacaagttgtcctaataataagaacacacattatactccataacactagtccagaagtctccggattatatgcttctgttggtccttactggagaggatgctggagtgttttcttttttattggttggttgtctggtgatcgtatgagaactttaatcattactgaggcaacccacatccttgatccatctgtagagagaaccttctcctatcaccgagtctgggtcagttagagtcttcagagatatttcatgctaaagggattaatcttaggttccgcacagtagtccgcagtgaaagtaaagtgttctgtgttgtctgtgggttcagcagcctttcccgcagcatggtatgggaataagccttcccaacgccacttgcaaggaagagctaggtatggaaacccagcagaacttcctttaggcaagacagctaagaaagtatcctgtgctgggcactgtatctctgtaagcagtcatgaaagccattataaaatcagctgacagtaatttccatagcaactaaacctgtttcctctcagctgctgagaacagccggcattgatgctctggcaatgtagtcatatagcctaatagcaggtgtggccaccatgatccaccaaagaagttaaaccttagaaaatgtaataaataactgcttagtgctgagtcatgagagcaaacctaagtttagattaaaagtaatattacagtatcatattattgctagatacatcttcaattttttttgccccatgggctgtggtgacatctaaagacacatggaacttcactggaaattaaagtgtacggtgttaatgtcagtgagatgattgcaggtatatgtgcagagaatgcttaaattgtgaatataccttgcactttcaaactgagactcactatcctcagaaaaatttcatcttggcatttagtgtaagtcttgagaaaaaaatgggaaatttgaataatatggtgaagtctgagaagttagacttatgccaacttttaacatatgtctgtgtgtatgcacattgagatatttatgctatccctaatgtaattgagatttcttgggacagaagtacattccacagatgacagagtttatcattattcttcggataaattctaaagcttttaccagatgttcttactggggaaaggaaaatgagttgtgacatgttagcacagattgttggaatggagtgatacagattccctaagccatgtgatgtaaagaccacagaatataagatggcaaacctaaaaaggcaaacgcagtcctgaccagtggaaacgatgctcgaaactctacagctctctcatctctaagcaggattcaaatcagtttctaactggcacagagagggttgtgtccttcagcctagacttccattgcagctctgcaacagttactcctttgctgcaggtgatttgactcctccggtagagctgtctacattgtacatgcacagtaacatgtttgcagaagaaattataaaattaatccgttaatgaattgaccttaaggatactttaaaaaaaaaaacttgtttaaaaataagcttttaatcactgcccttctgtattgaaagtataaaagctttgtttctttctaagaagcagccaggaatttccactcctaaattgcagccgtgaactttaatctttcaaggacacatttctttttccgttgatttttttttacataaacatgataatttttataaaactggagttcctattcttccttcaaaactatcgtaactattatatacaagaggaatgacccatttatgttgagtaaataggttaatttgcctgtttatagttaaagtccatgttcttactcaattactgatttcagaatacatgttctttattatataagaaaaaaaaaggagttttataaagtcaaggaaaatttccctgtttaatgtgaaatacatagaatttccctttaaactggcctcctgggctcaggggccccgtagagcaggtctgcttttccagcgatctgggttctggtagactactctctggaaccaggcagagactgtgtgtagctaatgactggcatgattaagcgatttaacttgagtcttggagctgtaatctgaaactctggagtctcttgtctttatgatacacacaatgaccttttatagttagcagaagaagagggagaggccttgtggtcacgtgctaaagtgcagaatgctcagttctgtccaaagcacatacaagtttttcattagttttgcttttttcaccaaatagatgaaaaaaaatatttcctatgcacctgaggggggggggaacaagaacagaaatcagtattatagagtaggcctcaatgttcccccaagcagaccttatttcttaccaacagaaatttcaaggagacagagaggaagtaaaggagtctgcctaaaggatgtttagacacactaaaatgattatgtgattcccaaagtgttttcccacagtcctttctaaaaacttctttgacttcagtgaaaaacttacttaatgattgcatttctcttgaaatgttccctgaagagcgtctggtaaaaacatatgtcacaccttcttagttgcatacaaactgtgactgcagattgtttttgtcatgtaaaatatgtttttcttacaaaagcctttaattctataaaacttcaacgaccctgatatctagtgacattgcctttcattttttaagtcttgtcaacactaccagaagaaggtgctttttaaaaagcgggtctagaagattagtttttgaatcaacgtttgcaagataaacctttccaagatgtgcatttgcaagggcatgggattgtgggtcagttgtgtggcttgtaacagcaaagattagggaaggtgtatgaaatcatacagttgtgtagacttaaacctgaactcattgtccaaagggatgttgaggcagagtcctctagtgttcccggagccctggagccacagggctctcatgtctacctgcagcaatttccttgtcactatcctgattggttgaatctcctacatggtttcactcctactcaactgggacatttaaagcacaaacacacacacacacacacacacacacacacaccatattacctggttcagtatgaatgtggcatcagcaccttctccaacagatccaatcatagttgccactagagtagttcatgattgcaacctcaagtctcattagaaaaatttgaattgtctggatgtttgttcgcctctgcatatgtcaagagctaagataactgtgatagtcagtaaaccacttagacctcatctatattccccaaaacaggaggagagccaccttagagtttctctgaaatctgggaataacgtagaccaactccaagttgtaaatcactcatacacttgttatcctgtattgatttccagggcttggaatttattataatggatgcacggcggcgggcttctgtagtattttagtaacacggagaataaataatatgtgcagagatacaggaatgtgtgatgggagaagcaaaccagtatcctacagatctctgtgggcagtagatttgatactttcaaggaatgtcgatgcaatactttttatttaaactatattttattgtactttttaaatgaacagaaatatgcatataatacaaggtaattgagaaaataatacaaggtaaaagagaagttgcagatattcatatttccaggctcagagttaattactatttatttactagataattttagcctcttgtttttattggacataaagtattttcagagaaggggaccttgccattcttcctagaacctgctcctccgcaatcggaaacactcttatgcgtccgttctcctttggcactgtcagatacaccgtgggcttcaatggctgcattacaccctatagttacaaggatgaatctgcatctgttgaccaagcctctgctctttataaagccattctccaatctcacagacagggaagttttgctcagatcagacatgtagcactgtgactatgaaaatcggcagacatatactgcagtccaactcaaggccccagccttagtccctccgtcacaggtatacggccaggctgttttatgtcacttgacatttaagtgacacttggttttgttttggattcagctctgtgcaataaacatatctgtggataaatctatatcctgagctatattcttaatctatatcatataaatataacaagaagtttgcaggatgtttgagaacaatggagactttgacacattcttctcatttccgtggaaaagcccaccgtgattcattccgtggtcactgtgtttggaaaatcctttcttattctaaaatcttatgagtgactatttattttcaagctctggtattttatttcttttaatctcttcagccataaattagaatatacgactactgctaaactacttttatttagaatatttaacttttactcctcactcaaatatttgttaagaacttatcaagtattgatcttgggaatctagttatgaagaaatagtgtatactccattcaagagaagctaattgtgtatttagggaccaggactggaaatcttcttccaatacaaaggtacagtttccgtggtagacgccataataggaatggaaagaagtcatgagctcagagatgcttctcagctgtgggcaatcagaacagtgctcctgtcagcaatgaaaatctagactgaaaaacagaacgtatagctttccaccacagtaaaacgccattagactatcgcctgtacttgatattacaaatgatattatggctcagtctaactctatttaagcttcataattagttatattactgtaatgtgactatgccagttctccccagaagtacatttcccttttctttcacactgaagatttagtagaatggaaattgcaaagaagaggtagtatggagtataaatgttaaacccacatatgcttatgtgcctgtgagcacacacatcttagcacttacacacacatgcttacacacacacacacacacacacacacacacacacacacacacacattctgctccagcaaagtcattaagaagaacattttataaccttgtacgctttaagctaaacttagccttaaatgggcatcagagaaataccagaagatctgtgagaactttatgtctttggcactggctcagatggcatctttatcttgaatgccattgagaagacaaggggggaggggggatggagcagactctaagaagcagaagcaaaggaagagaagaaaaaataaaagaggacagagatggaagaatcagtggtcatcagggcatgtgatgctggtgtgtgtcgagggaggatttgggatttggagaaaatcaattcttgaataggtttatctagaaaaaggccatgactccacctctctatttttaacttaagcctctctgcttacatctgcagaatacgacatttccccacttcaacatcagatcagatggcactatattaacatgtctggaagctaggcaatgctgccataccatatataaactcataaaaaacttaattgtcataaaatattgctatgtaggagtttgttgaaaggaattaaatacatatatgtagagtgagcatgaagtaacaaatgcagttttagcccaaagatccaaaacaaataatacttgtctctaggagtgactataaccttgtaattctcccttagaattattgagaggattaacagtcatgtaacctgacatataattagtgtgcccacggaacggcaggcatccaatgctatctattgtgtcttaggaatgttgggtacggtaaaacttcagaagttggtattaccctggttagcattgcccgccttctctgacaactgcttctatacagataataagtttctgtgggaattaaatgacaataataaagcttgacagcgcatagatgatgatactgatagtttccacagctccctaagttatcaaaaagatggatgcaatggttacttgttcaaacgtaagtctcatgtggaccaggttgtagaggtactgtttaatgctgcttctcttgacaggaagggcttacaatacatgggaacattttagagaatttcatcttcataaaaggagcattaacggaggaagttcctagctgctgtttggcacagagaaggtgctatagctataaaaaccatgaagccaagtcagagagctgcacacttagacatgatgatcttaataggtgtggtgagacggggctgatgagttaggattctgggctctcactccttgctctggttcatggtacatgaacagttagcgacaggacaccagttcctatccttgttattttgtaacaatataaggttggctagaaaacgttctgtagcatcctcaccatcttgcttgttacacagtttaatgatcggacaatgtagtgtaacttactttaacagatttattttaccctaaatatctgaattgctgttactcatttctgattatttgacccctttaaaacccatcactgtccacagagtatggttcttagatttttcacaaagaagggtctttggacagttcaggagtccaataatctgcaaaactatttcttccccacttcttacttctctatgacaattagacacacaccctttattttatctgccacttatccatttctgtagaatagccgtgtttatccttgtgttatgtgcacattagcggcagaggatttttctctcctccagcttcacattatacagtgtagctgaagccatggcatagctgcactgtgagcctgtaggattccaaacagaaggagccagagaagaaatgcacagtaaaggtccttgagtgttctgggggcacattcataagtgtgaccataatacacagtcgatgaaaggaaggacaaggctgcaagaaaagactcagacctccatgtacagtgtcagggaagtcaaagccaaaagactgctctttattcactccacattgagggaggggctctgagtgacttctggacttgaaagtaattaccacaaaggtcagtctagggtgacaagatggaatgttgactgggaagagagagagcgcaccaagaagactttggagaattcacatatatcaaagtgtagcaactgagtatcgaggttatatggtatatccactggaataacagtgtttatgtacctaagttagactattagtataactattaagttaaaaaaggtatgtaatattacgaaataatacttactgaacatttgctatgattgatgctttaaagtatttaaagtattgtactaacacaaagaaaacatattttaacttaattcattttaaaaattgtaactatagggggccatgggagtttgctccccttgaagtgcatctgtgggagcctgtgcttggtattgggtgtcttctcctcactcttccaccttagatttctgaaacggcatctcccatctcccactgaacttagagctcacctgttggctagatgggctggatccgcttgttagtacttcactgctggggttacacacatccaccactacatccagctttcatgcggatgacatcgacctcaactccagtcattattcttgggtagcaatcactttacccactgtattatctcccaaggcccaaagatagcacttttaaatttttcttacaaaaataaaaacggtggtccacaagaaggtaatttatccaaattccccaaagctaataggtgggggggggggggcacttgaacacaggagtcatagcctcagaacctgcaggtttgggcacaccttcaggtggagcccatatgctgtctccttagaaatgcactgtgacaaccagtcagtgtgtgtaagaataacggatgtgctactgaagtcaataaaacagctaacgctggaatttccttattttgctatctgccataaatgagtttatttttgcatataatttcagattatatttctggactcatataatcaaagtttggggttttttttgtttttgttttttgttttttgtttttttgtcctaaaatgatcaaaattcctcatcttaaaagaaagttgagacttttatctgagaccaggataaaccagtggaaggccatattgatcctcctgattgaaaaggaaaagtaaaatgtttaagacaattctgaaaaatattggacacctagctttatggattggatcataaatgtccctaagcacccatgacagtttgatcctcagtaaagcagtgtttcactaggcagcagacaatagaatgctgatgcattctccagcttcctccatgtgactccattaatgggtttggaggaggtgctctttctcttcttcctagtggcagtaaggtgggtggccttgttcctctccctgctgtgaggttttgccttagcacagacacagaaacagtgaaacccagcgacctccaattgaaaccctgagtcaaaataagacttttcttctttggctgatttccttggatgcttgattgtgaggaattcaaaaagcaatgaacatactatgcagcaaatcccggctattgatgagagaaaggaaaatggacaggatgagccatccgactttccagttagctgctggagtctcccatgctgtgttacagttagaaaggacacaggcccagcctcacagactccctgagatgcagtaaggcagttgagatcccagaagaccacgatggctagaattcttaggacaaagcactaaggaggagttgaacttctataaagaactgtacatacgggatcacaccattcacctctgtaaaatgtgatgaggccatgaggtgcttgagccgtcatcctaaaactggagaaggaacagcacaacccaggagcctcaaaatgaatctcggggcgtgctcttccatcagactaagatgtaaaatcacataggtatggactttaacaatcaggaaagtatttaaagcacagggtgttaaaaaaataaaagcaactaattagccatagaataaattttattctggtcccgactattgactcagaactactgtaaatactcaagaggatcaaatatcccttatctaaattatgtgattacgaaagttccaaatagtcaggcaagcactggcaacactcggcatctagtaagttattaacaatcaaaagttccccgtggtcagccacagtggaatcatagtcactcagaactcatgcaaacattagggttgtagaggagacaatgtaagattgcttcaatgatattttgtttgtccataacactagagaaaacattagcagcattggtaccaaacagaacatttagacatgcgctattgagtactatagatgaaaatattagtaaagctaaggacacatcaagagaaatattaaaaatatattacagaggcagaggccatcgaatgcaagggtacagtattgagctttgtgtcaaattctagcaaatttaaatacaagcagttggagttatcagaggggcagatgaaagaaaaaataatagttgaaaataccccaaattctttcatgttgttaactgacataaccaagaataccaatgaggcctaagccaagaaacatttaaaatatcaaggaacatgatagtcacatttcttaaaaggcaaggatgttgagaaactcttcctagcagccagaggaaacagatgtatctctataaagaaaaggaaggtaagcctgctgatgccagcgagtttctgactggggagaaagcaggtcagaggatggcagagcggcatgctcagggggctgcctttaaacataaacctgggcagacttagaaaatactctttcaaaaaggaaaaatgaaataaatcaattttaagatgtgaaatataaaaacgtcaccactgtgaagtgttaaagagagtctttcagaccaaaggaaaaatattactgggcaaaaaaccattaattcatataaaaaaaaaatgacgagccttacagcacttaatcatgagtaaataacttttattttcaattcttgagtcttttgaagacaaatctgtctgttgaaccacaaggtaattacagtgttcctttcttcacaacatggttgcccaatgacattttataatggaatagcttctcaaaaatctactcctgagtgtcttctcgtcatcaggaatgtggagctattgtctcaggtttgaactacgagagctttatacactttccactcacttctttggatataatacaattagtctttggctttgaatatgccgtgaagacattcgggtctagccttatctttttcatttaagttactgcctatttttctgcaatgctgagtactttggctttttaattgtgtgcagtatttcttcattatctaatttttagagattgattgatctagacgaataacctctcgaaagcctaatggaacttttcttctattatatctttgagctcaagtttaggtcctccacttcagtcatattaatatgtatcaataaacttaatatgctatctgctctataattgttttaatctttgttagaaagtcagttctgagccacgtctgttcttttcaccaattgacagttttataataatctgcttttgtcttcagtttctgtctttagttttatcacctagatgccgctcttttgttttctttttaattttttttctttttactttatgtgtatgagtgttttacctgcatgtacaaatgtgtgccacatgcatgcctgctgccattggaggttagaagaggacatcccacccttggaacaggagctaggaatgtttatgagatatcatttgggtcttaaaaaccaaacctaggtcctgtgcatatgctctaaactgctgagtcatctcttcaggccttcagttcatcttcttacatagtcttcagcagagactttagtagtgcaaagaactcctgtctactttttgtttgggttcctagtgacacctttcttccccagtaatggaacagtcttgttcctacagatcattttcattctgtagctcttgttggaagcctaggaatttcaggatcttggtgatctgagccccctgggacagaggaagacctcagctgggctatggtggttggtggtcccacctccatttaagggatggtgccttgctgtgagaagactctgcttggtttagctttcccccatccctttctttgcagagtctaccccttctcccccgtccttgtaaaggatttcacccagtctcttgccccctccccatgagactcttttttcccctacgtccctcatttattttcttctgtttaatgctggagataattggccctatgtggtgatgaccagcaaatcatctgtaacttccttccatctggtagagatcacactggttggggccttccagggttttggctttcccttccagtgtgatgctatattggttagcggggcctctacccctacacattttctctagttcataatctaaagtcaaagatggctctctgtggagaactggtggaccttctcagaattttaagtagctatcctcactccctctctggtctgcaggggaaagcttgcagagtccttccttctgggtcatcctggcctatcattgcaatggctttctgggggctgttttcttaattaagtgttggtgataatcttgtcttgatggttggtttgacctctcttgagctgttgttgttcacgtcggctgtgggaaagggaagaggctgcgatatggtttcaatttgctgtgttttctaagacgttgacatcacataggaaatttttttgacttggaaatttatctaaagccatacaggaagccaagtgtaggtactcctcatagggtataatttgtgattctatatctggtatctacaagcacaattatggcaatgcatcaggtacatctattggaaccaggaacccccaattccacgggtgcctcttcttctgtgggttacagatgtttcccatgaccgtacttaatgtcacagtttaatgcatgcaaatcccttccatatgggccaagctgcatgttcgtgagtgttttcatctgatttagaaatagcacacgaggcacattccagtcttgaacaagaccattttcatcttgaaaggaaaagaattaagttctgaatattacagtagaagcttgaatcggaatttaacgctttactgtgtaagtaaaattgctgtctgggaaatgaagacttggtgtttgccgtttctcagtcataagaataacctggatattttggcccaaacacacgtccccatgccagttcctagaggttctgattcagtgctcagcttcagtgatctcaggatgaggcggcgttaaagatgctgacgcaggcttcacctgtgttcaatcactaagctgtgaaacccatcgctggtctgcaagcctctgaagaaatcccattagagggtaaaggttgtgaaatacttgctgacacatgctccttttaaaacacctcagggtgctttctttgctaactaaataaggggtttacaaagtattcctattttttttttcttcagaaagccccaaataaagccatttgggatgaaattcacttttaggatattttgaaccaagttgtaagtcctcaaattatattattagaacagttgaatcctgatacagaataacaagatttgagagtagtctacttttatcataaggttttccccgtacctcctattttaaatcctaagacttcagtcagaagcttaacacatgctggtggcaaaacagcccggaacctttatgttggcttagggagtcagtgtgggtgtggtgacataaaccagaagtatgccagaaaaactttagaagttatgtgtacaaaatggaaagcttccttgatatttttcaaaaggacaatctaactcatttgaagcaaacttccgacctatctcattgtaattgaactgtattttattcaataattacaagagcagtttgaaggatttaataaggtagtgttgtgtggactgtagtaagatacatgaaggaacacacaagtatgttactttttatgtttataatgcttcctccttttagaacgctgtcaatttttaatacttgcatattttaaaaccatgcatctcctgtggatgatgaaagagcaaagctaagtcaatacatttggaacaaggccagaggaccatggtgaatgtgaatgtcttttggttccatcaagaatgtttgtgacggaggaagaatgtgaaaggctatttgttaaaaaacaaacaaacaaaaacaaaaacaacaattaaaaaaaccagctcgggatgcgtggctcaggcatcctttgccagataaatatcacttatctgtagtgagggttgatggaaaaccctcactacagaactaaatgagactggggactagctcatcagaaaatcctgaaggaacggtggaggtgaaggggcatcctgacgggaagtctaactatctgccaattaaagccttaatgctgttgtggtattttcctcctatttttcctcttcttttatccttttttgcctattaagtgtgactataagaatatatatataagattctgcagcagtccctagccacaccctctatcaagttctaagctgttcagagctatgcaggaattacttggagaaggctggatttgctgagtcctcagagaagacaaatataccctgccctctgtctcttttgagttcctctatcttcccaccgtacttctctggacaatgaactaatggtgtcagaggaggaagcattgctgtagggattgaggattctagatttggatttatttcccattgtgcactttggcaagtagaaagaagtcaataccttgcatgatacaaatacctgatttttttttttttttttttttttttagttactaacgttatgaaacacgttcctccgggcgttttattagaagttctgtggagaattttgtgttgtttattttaaaaatccaattacagtggatctcaaagtctagatttaacattctctagtccaaagtcaccatgaattaggaacaagttccttctcataggggacacttcggtgccattgatttagcatgataactggaaatcaggtgactctactgtaagtctatattattcctatattattgaatgactatattattccttctgtcagattgctcctgtctgaactaaagcaaacctggaatgtagttatctgaatattatttagtaattccaagtaaactattcactaatttgctcttccttcgtttnnnnnnnnnnnnnnnnnnnngatcatgggtttgatcatgtgtcacatactaaattttcctaagtccaacatttggtattccaggaagttgccctggcacttctgagtatccatttgccaaacagtatatgtagcttgaagtatccttctcttatttgttgaaaacattttagagaagatgtttgatagtcttaagttaccattggtttgttaagatagttctttgttccaacttttggagataaggattcatgacatcttacagatgattacggagtccttcattaagagaaagtaacacaggagctgaagtggagaccatggaggaatactgtttactaccttgttctccatggcttgttcagtttgctttcttatacaacccttgaccactgcccacagtgggctggaccctctttgtcagttatcaatcaagacatgctcacaggacagtgatgggggcgagggtgattcctcacttgacgttctctcttcccaggtgactcaagttgtgtcaagaaatctgtttaatttgatttttgtttcttccaaccaatttttttttctaatttatttcttttttaaaaagataacctcagaggtgtttagtatttaggtaaatggtattcttaattttatttctcatcatttattgctaatggttagaagcacaattgattttcatgctttgattttgtatcccgaaattttggagaactagttattaaaatgggtaatagtggataatacaagagcatgatcatgtcacctaaaaacagacagacttttatttcctttacttgcctaatgactctggtggaagcctctactctcgagttgaacaaacatggtgaacttgctttccttgtcttaattctcgatttagaaaaatgtacccattatttcaccgttgtagcatgcattttctgtcctgttttcttccttccttcttttttccttcctttctttcttccttccttccttcctcccttcctttctttccttttgtagatatccttactagattaaagacattcccttctagtcctattttgtgtgtgtgtgtgtgtgtgtgtgtgtgtttatcataaaagatactgggttttcttaaatgtttttcctgagttaattagattgattttgacttttattagattgatattgtatattacaatgattaatctctatacattgaaccagcttaaacctttgcttaaatctttttagtgatgaatatatttctctgaatgggtttttagtccctgcctgtcattgttttgctgaagattttggatctgcttccctaagaagggtctatggtttgtttctttgtttgtttaattttgatatctttctttgcttttgatgctctttaaactgtgactccgtagaatgatttgctacaacttcagtctgatttgtagctcctctagagagagttttcatatttttggccatatctataacaagcttattgatatgattgaccatattcgtagtatcactttatgatcaattttatttcatataatcagcaacaattatcttctcggtcctgatgttaattattctattgcctcctttttctttggttcaatctagtgaaagacttgccaattttatctatgaatggacaaatttttacttttgttgctgttttttttttaatctttccattttttagtttcatccatttctcggatcttcttcttttggtttgctttaattttagtttgctcttcttttcccagtctcaaatttgtctctttttttcttttttttcccccctctggcaaggaagctattaattatactggggttcttttgtgtgggaggtgttggttttttccaactactttaatagttgccctctttgtctaggtttcagtttctgattttaaggagttggagtgtattgaaattctttgcggttttcttatctactatgataaagtagagcaaccaagacaacttatagaagaagaggatttttgaagacttacagtnnnnnnnnnnnnnnnnnnnnagggagggggagagagagagagagagagagagagagagagagagagagagagagagagagagagaatatgagaatggtgagggcctttgaaacctcaaaactagtccccagtgatatatgtcctccaacaaatccatacctcctaattcttcccagtttctccaactcgggatcaagcattcaaatatatgaacatatgtggaccattctcgttaaaccaccacagagctgtagattcattaatgatgtgttcaatcaggccaggagatttttctgctagtatttcttccactgttaattttgctttctctctttttctgatacctatatttttctttttcttattacccatattgccagatacttagtggtgttcccacatttctctgaatctcccttcatagccatgctctgccttcaaaatgtaaccccaacaaaacaagccagtgaccatcagatccttgaagataatggcatttgccaccaagcctaacactgtaatttcaacccccggaacccatgacaaaagaagaaaacttaagcccacaagtttacctgtgtgctccacatgtgcgccacgtgtgcatgacccctcccacacacacccacacaccaaacacacacacacacaccaaacacgcaaattagttttaaaaagaaataccagctaatattaggtcattacattcttgtaatcctgacacttgaagtactgaaacaggtataattaccaaaagtttgaggccaacctgttctccatagtgaattccaggctacccaggctatagtataagacccaacctcaaagaaaaggaagagaaatcaaatgggaaagtcagaggttgtccactttgcctagtccactctcacgcctgcttccatcttgtcgcttcagacttcctgtttgatcctttttcctaattgcctaattgattatgaaactctcatcacacactgcttgtccagcaagatctcctttagtccttgagcaataatcatgagattgctttgaattccatcagacctggtcttgaggggcctctcccaggctgggtatctcctatgcaaactctagttacagtcagctctttctccctctggcttttgttgaaaactttaagagacgatacattgtagcaagtctatacttctaaggctcccaagcccgatgctactgttgcctgctgaagagactgagacagaaaacaagttctgagcatgctcgctcaccctgggggaactagtggttttagcaaagctttctttgactctccctttctctgatctctgttaagctgtctgcttctgttgatgtcacacccatttgtggggttccactaattgctcactaattacttcattgtttctctaatgccttagggcataaattgctccacaggctctttcaattaaattcaggcctctttgcagaagaattctttgagactggtctttgaagtccttagggatctttttctgtgggttttcttccagataactaactgggctgtggttcagctcattgtccccataaagctacctgcatcctcttgcttgcttaccaccaaaatttccatgttcaaaagtattcttatgtaatattttaaatatttaaatagttcttgtgaactaaatctctgagtgcttgttcaggattggagctagagacagtcagtggtctgcatctcctcagcttgctgtccttactggaaacctctcccctttgcagcatactgcaacagtagcagtgtctgccctagtgttcttggccagatgcaccctgagtagcagggtagtatccattccttcagagctctaacctgtctgtccccgcaagtgaacttctgcaataccaagctgaggacacgagtcatagcctgtcttccccggaagacaagactcagcccttaaaagaaaagggagaaggggtgatgtctcgctgttcttgcttgtactggaacctcctcaccctgagctggcacatcagaaggagggcgtggctcccaaagacacagactcttgctgttactgcagtgttgtagactttcttgaagacatgttaattagtctgctttgtgcccctaggacaatattcccagacttaaaatggctgctgtttgaagtcgttttattcattgtttactggggaccaggttagcaaatcttctatcatctttctataaatttcttttatgtgtatgtgagtgtatctttaaattcatcaacttcctttatgacatttaattaatcaaaccatctctttattttttttaaatgtcatatatttccccctttgatcgttctcctgggccagtttacaatctcacttcatctctgttgtgcttcttatccattccttaaaatctgtctccagcttagactgagtctcagccgacaccgaacctcaggcctctccacctgcatcccaggttccagttcttctgtctttttgagtctgggtttattgaagcaagacctcctaagggtttagcctcccaacagtctctatgtgagaaatgaacagtcatgaatgagcaggactggaagatatattcatttgcaagaagacagtagggaggcaagtttagtgtccacattcctcatagcttctacataatggcatgtttataactcttgtgactttttttttttaattttgcgtagttctacactgtttatgcagactacatctgaggttacctaagagtcaggaaagttcctttctcagggttcttatgtggaaggggctgtgtccctattgtaaaatgagcttatattatatatatatatatatatatatatatatatatatatacatatatatatacatatatatatgtacatatatatatatatattcaagtttgggattttacatgtgttttaattttttcctgtgtgtttaatcttttgctacttgcatttattgtaataaagtaagtaatatttactatttgaattttttgcctaagaatacggtgtttcagagtttataaggtacctgcagtattgtaacaaagtaaaacacttattcattctgcactactcacgagtaaacagctagtcacacacaaaacaaaagatacattctccggtggaaataaacaatttttctgataaattagtctggagaaatttcaaataattgcgtaggaattttcactctgagggtgtcatttagtctaagacctctgttaattgtggtggtttaggtcaaggcttctgctaccatttctactctcaatatcttttcattcaagaaattttcctgtgatcatgggtgcatgggcatataaactgggaatacagagagtcttttttttccacatcaaattaatattaaatcctagaaatacatatgaattaataccaactcttcataaataatttaaaaacctgaatgatacatgtatatgtaccattactcttataaagccagtataacggataataagttatgaagaaaagtttaagacttgtttttattttatgtgtacaagtgatttttgcctgcttgtactaagtgcagcatgtggatacagttccaatgaagcctagaagagggcgacaggcctccgtggaactcgagttgccgactgttgtgacccaccatgtgggtgctaggaactgaacccaagtcctctgcaagaacagcccttaactgctggtccatgagtctggttccagggattaaatgattgcttggacatatatatatatatatatatatatatatatatatatatatatacacacacacacacacacacacacatatatatatatatatttgtggaaatggtgtacttctttgctattacatgaataattggatattgagctcaataactatttgatcccatcatacatagagcaacttccatgcttctcagaattaactcacatttgaacaccactcagtatgtatagaaaacagcagaaataagtgtggagctgtttcagaaattgttagaaactctatcctaatcctaaaccaaaactaatgtaatgaatttttgtgaacctcaaagccaactacacaggcagcaattctaagaaccctgacattctaacttaatgcaacccagtatactaatagatgcaggctgagagtggcagttgggaaaccttctgtctgcattttctataatcaggccatcctgttgctgtaccttggagtgtacagtgaaaactgcagtttaaaaacatggaacagagccagctttagcccgggtccttcaggcagtcattgtgagcttgtgagcatcgggctgcatgtgcaaagtgtgcatatggtatgttaacaaacacaactagggccacctgggccattgctggcagaatgacctcttcagatttgtcacaggtgtggatttgtattccttttggataatgtgtgttcagaacctttttactattgcctggttttgttttgtttggtttggtttggtttttttgaaactcccacattcaataatatgaccccatgtggagtttccacccacaatctgtgaggttgtgagaactggcataccaaccagttataagactgctatgcagtttacttagtcagcaaaggttaatttcagtttacccaaatatccaggggaggctggtgggagctttgatggtcatagcagctcgtggctatgaaaaggaaaaggctgactctcatacccacccctgtagatactgaagcagggagaggagacggtggcctggaagctagcaggacacttctgttcttgctttattgacaataaatgtcatgtgctacagttacacctttgtaagggacaaagacttgtttcttcccgtgtgtctgaaaaggggcaggttgtatttgacaagcagcgatatgaaccagtacaggtctggagagtgaaagagtctgcctggccttttttttttttttttttttttttttttttgtggaatctgggcattttaaagacctggttattttaaggacctgactgttttgagagttgtagaagcaaggtgcttgacaaaagagacttcacgggaaaggctttaactttggagagagttgagtgtgtttgagagacacaagagacacaagagacacaagagaaggaagaacccgtcgtaatggttcaaagctgtgagtttaggttcctagtagttatcattgcatgtttgccacttgtcagcagaaatatttttctgttctgcaggttttgtttatagtggtggcacaagggtatggaactaaaattcatgtttcttttgggggatcttaatttaatgtcaagtgtacttggttttaaaaccaaccatgatttttttccctccaatttggcttgtctgtgacaacccttagcagagaaagaggtcttcggataaaaactgtgggctaagggactatagagtggacagcataaagttctcattgtaattttttaaatacctgatctctggtgatatatatgtatgttatcttgcagctaagcagagaaatgtctctaaataagtcatatatatgaattattactttgattcagtctctgaatcaaagatgattctgaataagatgattctccccagtgcatcatttgtttaagacaattctgttcttaccaaggtaggctttgtgtgaaacttagtaatttaaaaacatggtgtgcagggtctagggagatggctcagtgggcaagagggctctctgtgcagtcatcaggatctgagcttgatttctggcacccactcaaaatggggcggggggggggggatagccctggtgcctgtatcctcagggttgcagaaggctgagacaggaggactgctgtgacttactgcctccactcaagctccaggttcagtgagagactccatattaaaggcatatgatagagaggattcagcgggactcctaacttcctcctctgcatagacacgtgcaaatagccacatacatatacacatacaccacatagagtatgctatacatgtaaacacacaaagaaagaaaactagagaaagtggcttgtcgttatttttgcctttctcctctctgtcccttcaatgactacagctttattgatataatcttttgtattttcttttcatttctaactttccttccttactaaacgcagtgactgttatgcatgcacaagacatctaagcttgcactgaatcaccagggatcaacgccagggttctcccatacgcttgccaaatgtgccaccgcttgatatatgtccccagccggtgtgatctctagtcattgacattttggtagtactaatgtttttattcacaaaacatttcggtttttatcaaatccctttatggcttctgcttagaacgtaagtgacacctcatctccaggcgttcagatatgcagtgctatacgtgaacttagtcattacagaacaattccaaaaccgcttcgttatcaaggttgcaactgagagacaatgtagctgaacataaatgtactcagacatgagcaggtcaagcaagagaaagcagtaattctacagaaatctacaccaacaactccaaaagccatgagaaacgggcttctgtgttgaacagttttaaccctttccctgcctttgctcattcaccttcagcagtgtgttaggcagcccagtcagttgcaagcctccattgtggaaaacgttgcattccttcacttgagtcagacactgcaagatggaaatgcagttatggagtctcttctggcagccagagtgtctactctgtaaagattgtgattttgaaaagtctgtctgcatacctaagttttccctgatgctttctttcacttacgatgttacaaagcatcgattcataggaaatactaatactctctggtccaccctggacactgtgtatttctcagagcatggagcactattaggtattcagaatcattgtattttattgttctcagccttctctgctctaagtgtttcgttgaggattacagagactttgtggacatgagtagacactaagcttcccaatgtctgtaaaggaagtgcctttagatggtcagcaccttaaaacatcagccagcctcaagcagttgacaagaccttccttcatttccagcttgagtcagctgtctctgtgtctctttgaaggttccacaaagtcagaccagtgcctcccatcggatcctttgtgcgtgtctttggaaagctcatatctgtcttcttgacaaatcagtgtaccagagacagagaagtatttcatgatgggggattccagcaggtgcaaaggcctctgtaagggttaggcctctttaaatggcattaatgttgggtaggactctttaagcatcttaacattacaggagatgtggaaaagattagaatttggaattgcagtggagactggtactaacattaccatggatgcttagacttctaaacggtggcgcacttgcaaagggtggctgccactggtacatgctgctccctagctacaaagtcagaaagagggaagaaatatggagtgggttcttacattgttaaattaacattttaaacttttagtaatttcatcgtccataagatgtcaacatacttcagttagggctctcagttgccagtctaccagaggaaaaaacatagcctatataattaaaaataggaagcagaggaatgctgtgtaagggtattgagtgtgctgtgggacaggacttgcaggaagagtggagaaaggggtctggggaaggtagacaggaaactacccaggtcctttctctggcctttgccacctcctcttgtgctgaggaaactatgtgactttgcatggtgctcccaccaagaactacaccatggaactctctcccaaatgaaaagaaagtttgaacctagtataagttaaatatagctacattttttttctctgtagttcatgttatattttgagtgtgagttttgggtgctctgtgaatctataagagatcatcttaagaatgaaagtgtattgcaaaaatggaacaattcaaccaaccttagctgttgattttttttttttgctccgaattagctagagttgtttttatgcataacatttgattttgctcctcaaagggatgatcaatttaggaagcccatctcataggtcttaaaatttcttgactgtatatcaagcaaagttgtctgtgattacctgagaactgggataattttcctaatgactagaaggaaaatagacacgggccttatataccaaaagtgaaaatgtggagtgtgtgattctgagctcaacgaagatatttttccaataataattttgaggtggatgataatactaaataaggagagaaggtgacaaatgattgaaaagaaagacaatagagggtaggatatggataaatgatagatgattgacagaaaacagatgcatagatatatagatgatagatgataaattgattggtgatatttagattgactgatagataaatagattacaatataatataattattacaatataataaaaatcacactcttctcaattttgagaatagaagtatacacataagcaaacaaaagcctgacgagtttttatattgagctacaactggattgactatgagatgtttcatatacctgcaatgttagtgacatttggaaacatggatgtccaggtaggttttctttgatgtcatcacaggtagggtcagttttcagtggctcaaagccactgagacccaagggaagccagagagtccacagagacttcatctgaacagataaccttaggactaatcaggaaaccataactgagcctttgtccaggtcagatcaacactgctgggagcaagagtgagagttggcaaccaagagtgctctctgtggcagcccagggacaccgagggacaccgacaggatttctgcttttgtctttgcccattgcacttttaagtgaggtgaaaagggagtgtcctcttttccctgccaaacttttttatggacctggtatttctctctgcaaaataatttattcctcgttgcatagtaccgtttttcagactgcaaatcctggctctggttccaaacagaactttgaaaaagagggagcttgaataataggctcagaagtgtattatttcttgggaagatctacttacccatttaagtggtttcctatggctttcacaagcaagaacactttatccacatataattaggaggctcaaagccacagtaagttttacgtagacttttctgcctccttcctgcttcaccttacaaaacttttctgttgtggcatgaagaactcaaagacagaagaagtgtttttcaaataagagtaacccaagatattagattattaatagtcatagtgataaggacaggaaccaggcagtgtgcatttattgaaaggcagacactgagttcagcactcaaggtgtgtccttacatccacatgttcagagagagcacctgctctgtgtaagttctcctggtttttgaggttcgttttacaaacacagagacagaagtaagcgaactcattggatatgcgatgtttccgaatgtctagactgttaatgacatttggaaacacggacacccaactagattttcttctatgttaatcactactgttcatcggccactggtgaggctggctctcagatcacaggcaagttgctggtgaaggcttgggttcctgaactggcagagtgcccctcccccctctccagccgttgaacttggtgcttctgtacagagaagtagaatgtggtaccttgcttatcagagttacagagaagcaactaaacgactagacgatctcggtaccatttgcagtaaccataagtgcctcaccatattgcactcatgagcaattgcacacaccaacatacatgatctcctgtgccctgcattgcttgcttagcaatgtaggaatcacattttaggcctgagatgtgagctgtggaagatagaagaacagcaccatgaagacagaagggcctcggagctataaccacctataaacactgtcagcgctgttagctgtcttagtatgggatctgctgcagaaagcttgtatatcacagcatggcgcaggttctgacgttcttcgtgatagttacagcagcagtgatgtcatctggaggagagccagtcacacaaaaggtatcttttcactaaatctgtttcaggcagcctcatttaaggctatgacagaggctcgcatagtgcaagataagtgtttgccaaagtgtgtttcacccgacactggtcttcaggaatgctcctgtgtaaaacttctttatgagcaaataaattttgaagactgcctactgatagcctcctcttggcagttaatacgtacctgagtacattaagcactcccaaaggttgcagcgtcgtatctacaaaggagcccgttttcttgaattctgatatatttcctgatgtttgaccacagaatccttttttaacaaaatattcctaatgttttgtgtaactggcctgacactgaccacatgtgagaaatgctgagttacactttactctgaatttcatgcaggtgtgtttggtcatgaatgtcatgaatcatatcaaagacaagcttgacacctcagggacctagcttgtaggtatccaggttccattttctattggatatgtcaggagaatgagccaggaggtccaggctctcacttaaattcttttgatgagacaattttgcagccttgtttcaccatctgttggtccataatcaaaccccttcatttctaacatgttccatctctaaaggctgtagaaaattattcaaatttaagtaatctgttacagtgcttaaaatgctttctatgttccatctcgtttggtctaaaacttttggggaggtaagcaacagagcctgcaggtgcccgcctaacacttcggattcaacggagactttactgggcagttccacattatcttctgtagatagtgtgtctggctgcttgggcacttgactagcattttctgtcatccatctaagccccgtcaccacagcctctttcagcactgaagcagcacttctttaccctctgcccatgaagagaccagcagcaaagctgctgataaggatgtgttcgagctgtgctgtcacactgtggagtagctgctgaaagagaacatccgtcgttgagaatgatgtaataggaacaggaatggaaacggctatacccaggcaatggttcagaagtctgagcgagacacagtggctcctgagatgcagatcaaagtgcccagtggagcactcagtaagccaagctaatttatcgacagaataaagaccttatagtcttaaaatatggaatggattagatggacacaaaaatgtagctagtacaaagcaagatgtattggtcgagtgtagaacaaactgtgccgtgataatcaaagatgctgagaaatagaagaaggagtgtgatgaccgagggtatggaattggggatggagacatggctcagacagtgaagtactcactctgtaatcatgaagacctaggttggattggcagcatctacataaaaaagccagacacaggggcaggtgactgtactcccagagctgaggacgtagaggcaggaggtccctggctagccaatctaatgggatcatagaaggagatagctctttcacggctgttcctattacaccattctccctggttcagggcgagactgtcagggagagtgtttgagaaagacacccaacactgatttcagggctccacatgtatgcacatacatgaacatgtacacataagattttgggaaaggggcaggattttctgttagatgcaatcactgattcaaaacctgcctcacttaggtaccagctatgccactttgggcaattctgcttaacctatgtaaaatcactaaaggagcgagacatgccaccaaataagactgttaacacaattaagcgtttttgtgcccatgacctacacacacttcactacttggcacatgtgtatcctttgtcttctttcctcttcctccacatgcccccattttcttccactcacagggcagtaccaaagaattgtcaaagagctactaaattattccttagatagatttttgatgatgaccagcatgtaagtccaaaatattattgtgttttgttgcacttaacgtctgtctgtctgtatgtatgtatgaatgtccatctgtctatttattgctttttcacgacagggtttctatctgaatctgcgtatcttcagacacataacccttgctagagctatcgcctcagtaccaagagctgtttcatttccgtttctctgtggtcttgggagatagccgcagccgcatgtatagatagaacattctctatctgggatgatgtaaatacttgtgctgtctggtttggtagccactaaccaccgtgcggcctctgagccctccacatgtggcaagagtgactgaagaactgaatgtttgttttatgtcgctcatgctttaagctgaaattgaggaagccacatgtggctgctggctgcttctttcagccacacagctatgcatgctggcaaaccccagagctgtgcagttttagagctgagtgcactttgcttccttaaaatgatcaatttcatgtcaccaattctctagttgggacaaaaaaaaaagtccctttgtaagcagcacgggatgctcttttcataggcgacacttcagctcttttgcctaaaattctacaactttcagttggcaactttcagtttcacctgctgtcaaattaaaggcatgtttagttagaaagatcaggaatccaatcattccaataattgcatggccataagcaaaaatttttatcaaaatcaattagtcaggttaccaaaataaataaatgaaataataaattaatatactttattgtgataaattttattatgataaactattgttctctaaaagcaaaaactatatgtaacatagaattgtagatcacctatgaaggcaagactttatttcacttttctcttttttttaaatttgaatttaattttattttttattagatatcatctttatttacatttcaaatgttatcccctttcctagtttcccctctgaaaaatctccctatcccctcccctccccctgctcctcaacccacccactcccattcctggccctggcactcccctatactggggcatatgatcttcgcaagaccaaggacctctcctcccattgatgaccaactaggccatcctctgctacttatacagcttgagccacaagttctaccatgtattttctttggtaggtggtatagttccaaggagctctgggggtactggttagttcatattgatgttcctcctatgggacttcgttgctcacttattttatttttgaaagactctttgtttctagaagtttttgcttttctttgtattccactgtgcctttcaatataaaaataagatcttatctcaattcaattttaacttttaatttcataataatcttataccagttgtcttagttagggttttgctactgtgaacagacaccatgaccaagacaagtcttataaaaacaacatttaattggggctggcttacaggttcagaggttcagtccattatcatcaagttgggagcatggcagcatccaggcaggcattgtgcaggaggagctgagagttctatgtcttcatccaaaggctgctagtggacgactgactcctaggcaactagggtggatcttaaggcctcacccacagtgacacacctactccaaccaggtcacacctccaaatggtgccactccctggcccagaaatatacaaaccatcacactagtcaatgctcgtgtgtgtgtgtgtgtgtgtgtgtgtgtgtgtgtgtgtgtgtgtacgtgcgcgcgtgtgccggagtaaggaaatctgggctgtgctttgtctgttcagggaatcttaatgcctctagcatgatgttgctctggggatcacgtgtcaggctgttaatcaggttcggaggggaagagtgagatattttaggctcgcctgacttagcagcagtggtagttcatgccactcaggagccattgatgtgacacactgagttacatcaacatgtactgttgtacaaagtatccctcagcaaattgtgtggaaaattttatttgtttccaccaaaatccagtcttaaggaccttattgtgtttgagtcaagggacacatgagatctgcacaagtgccacatttttattggttttagtctcccttgaatatgcataaatattttgtgagcatatatcattttttttccctgaaagatactcaggactactttgttttacatttttcttagagcccataaagaatgtctgttgttagtcagagctgtgagcgaacttcttttcacattcttcctttctatctctatttccccctcattaagtcaggtcaaaatgcctttttgtctcttcaaacctttatttcaaaagtggctttaatcctccgcttaatcctatttagcttttgatctacatcactttagggaggttgttctttaagtaagttaattgattttacttaggagcacacacttcaagtccataggccatgaatctcaggagcaggactttgacagccttcctccttatggagagtaacagcaatgacaggaattttgtttgtaccattggccagcacctaatgatcattctctccccctatctctaatgcatcctttgatgttagtgtcaaaaaacagcggtccttctctgccaagtacacatcccttccgacgtattaaataatgtctatgttagagataaactgcgctgcagctgtgctcactaaagtggctgctcatctaacacaaaagcaaatcttcagtgtcgacctcaggcaccaaggggtcatgacccctgatgtcagggatcaagtggaggcttaatctttggggaataatcaaaatgagagtaagacatctaattatttgtataaatattatttatcttaaactcatgcccatatacatacattttgcaacattagccatttgtaagttcaggaacatggactacactcacactgaggcacacacactcttatgcagtctctctccccacccatttgtagaacccttttgattttgttaagctgacatctccttgccacttagacactagcttcccacccacatctcccggctcctccaggcaaccactgacataattgccattttgataaattcagttattctggtcatctcatgtgagtgaggtcacatggcttccgtcctcgtgtgactgacttacttcagtccacgtgcctgcacctccccattttggtgaggggagtggtactccattgtaaggacttaccacattttactattcattcatctgtcactgggtgggccctaccacttgatcattgcaaatgctgctagctggagcattagtatactgaatgataaatattgagtgttgaaatattaacaagcatgttttagtagccattttaacagaacttcaagtaatctttggttttctcttatactgtagctggaacactacactactctatgggctgcttgtcatattacaggtttgtcacatatacatgtctgatgccctccataagtgactcagctgtataccttaaaagcccacctagcactcaggacttacaagctgatagactcaaagctatacatattaatgtacaaacataaaaacttaaaaacacatagagttcacctaacacttatattcaggatcttgtgcaacagtgaatctctctgttcatcactgttcactaactggagagtcttgtctgagtaaacccaagagtgggcatggggacgcagggcagtctgatgctatatcaatctagataaatagcagtattcagttcttccttggggcctatgatcccccttgctatggggtgtcctagatcaaggtttctattacaaggtttgtgttttctcttgtgaagcagtctctaatccaaggagaaagcagatggttacccccatgaccagagttctcctaggacacaccttacttacataagtggttcttgtagggtcgtattattcacagataagttagaccattgatccctcttctccctcagcagcctgcatagcatcttctggcacgatgaaagctagcaggaagggaggacatttccagctcagtcctaggtgttttctgcatatcacacatccaagatggatagtgtctttagtagtaggctcttctcatctacctctggtaggcaagcaaaaagaatggcaagaacttgtattgttttagagacctggggatgcctccatgactcccaattcagaggtacaggacctgtttcactggggctttaataactcatagcttctgcaaacagctttttctggctatatgaggtagctcctgttaaagtctctttttaaaatatatatgtaaattttaaaatgtggttatgaaatactaggtacgtttatggctctctctctctctctctctctctctctctctctctctctcctctctctctctctctctctctctctctctgccagtgtgttttgattaatcccctccttcatctcatctgcatgtcttctctcatgatacaagcttgcatttcagcatcctagcctccctccatcatgttctagagtgttttcaaacctcactcttctgaggataactcccatatacaggttcaagcctatgatgtcatttattcatatgaattgtcctgaagatgcaaattcatagtgccacggtgctcagagagcagttgtctaggatttggctgataatagtcctaacgagtcttggggaagtagtaatcatgttccagaactgaactgtgataaatagttcctcatttcaattaatgtaccataagtcatctaattgagtgtttcagacagatagatttatgacatgtaatctattccttaattaagttgtttggagaggaaagaaatgcaagggtctgacaattgttttatgagtttgctaattgcccaaatgtgcaaaagcatgagataaagagccaggcagatggttcagcctgctactccaagctgaaagcctgctggcagaggaaagtatacatagtagcagggctggggggagggagaaggaggaaacttattgttgggaagggagcctaaggttgcctgggtttttacattccaccaggaaggctgattgcaaaggacacagggttacttgtatccactaacaatatgttaagatgcttacattttgagaaggtgctgtggttagatagagggatgagtctcctggcccactggtttgcttgagggtgggttagaggaaagcaccacaggcctctttcctgggaacctgaaacccctaaagaatttggagatacacatttatccatgcatctcgagaagtcataatttcactgctgtttggtaagaaatggagttttcctacatgtccagaacatgatataattgaaaaccacaaatccaatatttaaaatggcaaaatatgggttttatgaaggctttaaaaagttatgacctggcaaatgcttattcataaggccggtatatcttcccatatacacaaaaggattttcttcaagaatgtactttgcagccagtacatctgctgttctcatgaaggattaaaatgagctatttttgtggaagttaatctgcaaacatataaaaaccttaatccagcttgtgccaaaatacctgctcgagattttgtttcattacgttgactttaattatcttcgtgttagctctcaaagtacactgaactttcaaaacatccatttcttatttgcaaagaagcttcatttctcactaaacacttctgcatgtggttttaagtttcgtttgatcattttcagcctttatatgctagataatgtcatacgtgtcattctgaatgtcattttgttggagtttgattttcacagtagaagttttctcataaaaaccacaccactcatctttgcaatgaagtcccgagacatcttgtattccccaagggttagtcaacgatgagatacagtctttctggaaagagaactcttttgcatatgtccctcttcagtgttcagggccaatgggagtcattacatcagtctgacactaggagacggactttacccctgttcctcacattttatgaatcagcatcaattccactcaaaggctgtcttgctggtgattcagctctgtctacaagaatgtttactggatgcctagagtgtttatcgaagtaaatttacaacatgaagaaaataggctagaaatacccagagccagcctttgagtcgcctgtagtctgattcagccctcaagctttgaagtgcatgtggagttcttgaacatttcattaaatacactgagtctggatcagggagtcttaaggggctatgaagtcacaccaagatagcttggccttggaccttaactttgatgtgtagtgatgacgtggaaagtcctcatacgtgttagggcctcataggaaggtcataggagtgctgcacatcacacagttgtcatttattcagtctttgctcatcatctatagcagagcaagacaatggtcatttgatagagagcaaagaggatataatgtccacttgctggtaaagaatccacgattgcaagtctttcttagcatgtctttcttcctaagtgagctaacaatacgagtgcagcctggtgcaaagatgggtgtccacttgttatacttaactatttatgcactgtttggattgctgcaatttacatttggtatacaaaagacatctttatcgtgtcactttagctttctaaactcctgatcacttggtctgaaaagaaaatacttctgcgctaagtaggtaggggattaaggtgggggaatccttggcaggaaaacttgttcatctcatcatttccatgtggcatgttgggtttagcatagctagaaccttcaatttttcaaggaaagttcgaaatacacatttcttgtgaaatgtcccgtttttacaatactggctaccaatcccgattctttaaaatgatccaagccaagacagcacatctgtgcatccatttgcagtgcccagtgcataatccactgtggtctcttaatacatgtctcatgattggaaacttataaagtttctaaatgaaactcaactgctcttctgtccttagatgatttgctcagaagtaagagtttcaggtttttgcatatggggtttaagaggatctaagattggagcatgatcataaaagccatctttccccctccgttctcattccagattacaggacaggcccgtgtttcactcaagtcaataatcagatgtgccaggggcagctgacaggcatcgtctgcacaaagacactgtgttgtgccaccatcggacgagcctggggccatccttgtgagatgtgtccagcccagcctcagccctgccgccggggcttcattcctaacatccgcactggagcatgtcaaggtgagtcaactgtttgccacaagtgtcacctctttgatgggaatcagacaacgtgtaggaaccacgaacacagtacccatggcaacagcagatcctgctcagaggactgatgagagatggtttgtatttatagtttacattttagcttccaatgaagtttcaactcttagcatcaatggagaggaagaggaggaggaggaggaaggaaaggaggaagagaaggaggaactcttaaaactactacttaaaatgtagaatgcattgagagacgagatgctcctgtctgcatccagatggcttaagtgtgcacacacacagttcttctggagagactgatttcttctctcttctcaccatccatcatgtctttctctccagatcgtcttctgcaactctccaacctcataagtggctctggtacttatatcaaaggcagatctgagacccgaggctcctacagccaccgtgtccaactcaagtgacctagaatggccctcttcttgctagttagttctactaggttttagcccacagagcccttgccattcgttggctacttttgtgatgttatctatactaaatccatcttctgagcttggggatactctttctagtaagttgttgaatgggagttgaaatgtcttttgtattattaatagaaacggtatctcatggagttagaagtaaatcatgtgcaaggttaagcttgttttcagacagaattcaccaagaagtaaacatgacactacccactgagtagatgtcatagtgtggtaagcagaccattgtcccttatgtcaaaattacagctggggatgtgcatgcagctctagctcattgaataatcaaccatggatagtctacacagtttggtaaatgatccatgacagaagcatcaaaagatttttgctagtttcatagtgctattaaaggatacagggatagtaccctgagctgaaaaaacaaaatttcaaatattccccaaaccaagaacattttgagtactgacaccatgctatgaatggaaaaattccactgtgaactcatgtaataagactttttatcaaaatgcacaataatcagggctgtagaaatggctcagcagttaaggatactgttgctcttgcagaggaactaagttcggttccatgaacctacattaggaggctcctactgcctgtaacctgagttgcaggcaaccctaaggtacctgaacccatttggaagacacacagaagtgcacacatacaaacaaagagaaacataagtcttttttaaaatgcacagattcattaaaatactgaataaaaattaccttgaagttctgtgtgcaagtatgagaaacatagtgaactttgtgattagaattgcacttcatcagcaagacatcccatgtgggtgctgatagcccagaccttgaaaacaacgctatccgatcttctaaggcagctaaaaattaagctggtgttaatcacggattaatcataataattttcaaaagagagcttcagggtccttgaggtgatcacagtacaactctacagatcagaaaataaatatgtagcaagaaagaaggccatgtcagttgtggacctactgtggtattttagtaaaaattacagattagacctcaagggtgaggtcccctcccctccccctctcnnnnnnnnnnnnnnnnnnnntcccctcccctctcctcccctcccctcctcttttctcttctcttcttttctttgtattcgagtgctctatctgcaccgtactctgcgtgcaagaacagccagtgctcttaaccactgggccatctttccagctctgcactttattcttaatatctgtttatttttgagtgagcctaggcatttgtaactttcaaaggacttgcatatttcaccttaattattgaatttctattgttcacattttacatctttttcatcttttttactatttggtgacatgtttattgttggtacttatgttacatagtttttcttatatctgagattaatattgatgagatacatcagttttactcatatttccagaaggccagatttcagagtaattacctgttgttttttggttggttggttggttttgcttgcttgtttttggtcttgtgttttattatattctctgacttctattcagcttccatttgttgagtgcttttaaaatttgtgaatatggaaacttagatcattaggcatagaatttactctttgcaatataaacacttactgctctgtgtgtacttctaggtcccagtttagctgtagctcacaagctttaatgggtatatgttcattatttaattaaatatgtgttcaagttttaatttctggtttgatccatgcattattacagaatatattgttaaattcaaatatctgagctttgttctagatcttttccatttctgcttttagattaacttttgtgcttacctagcttgcatgcgcgtgcacacacacacacacacacacacacacacacacacacacctacttgtgaatctgggggcggaacccacaatcttttacatgccaagcgttatatcaaccagagctgtgaatgcaatctctccttcatatatgtaattccatataataagcctttatacttaatctcgctgtatgtaattcactagtgtgggtggtctgtgtgcatttgcagaaaaaaagtctcttcagctgaagtatgtgatgggtacagagaggtgaggtgcttgaaagaaaaccaagtcctgtgtgtcctgtgggatttcccgtctatttgctttattaatcacgaagagacacgtgtggaagtttccattccaattgtgcattaattgccttcatttctaattctgtatgatcaagttccatttgctctgggtgtttactgtctcatgggacacatacagagttagcatttttgtttcttctaagtgaactgaatccttggtcattagaaaatgtcagtttttaatctttggtattgtttgtttgtttgttttctcatggcaaacccttacttacttttgccacggtagacttcttgtgaccaaaaattgtttgaattacctttgggtcttcctttttaagttgtccaagtggctttcttgtgaactacataaagttgggacttggtgtttcaacataaaacattacaatctcagccttttgcatttgactgttacattatttaaatccatgtagctgtgaacattatcacgaggaaatgtgcatttcaccattttctgtttgtcttgttcacttttcatatctcccttttcctgcttctactgggttgactatgttcatattggcttttatttccagtggattgtgagctgggattttgttcattttatagtgttacctacacatatttaactgatcacagttaaattattttcaaatatgaacaatccatttttatagtgtggtgactttatatccctattcttctcttttaatttgtagtgttcacttattattattttactttttgtttctttatgcattacaacctacaaaatacattagccttatttactatttttgtttgcagccaacaattatcttttaagctttcaaaaataagagaaacatactttgtattccttaacacactatttctagtgccttttattttgaggaaaggtttaaacatccatctaacttttccctgaagaaattcatttggcttttcttagagactcacattttatctgttggtaacttttattattacttcattaatgtcactatgacaacattaaagattcaacacttgttcctaaatgggtgaaattaatacatagtataagattaagaaggctatggccatctaaaactgaggccataaatgggaggtcactaaccccagtacaatactgtttaagggatataaatccataactttcaaacaagaaaataaaaaccctaataaacttagtaataagtaattgaagtaacaagagccaaagtactatatatttacaaccgttagataaaggaaagttaagagattaggtagtaataagtagcaaaaagtgggaaagttgtatcaagaaagagggaagacggagcgttcatgagttatgaaggtgggttgggattgctgtggtcatttgggagaacacagagtgccctttatgcatagcaggtgtgtgtacgctctgtccaagacttctgccctgggtctgtggtagagagattgagtgactttgaatcctcaaggcccatagtcagtgagatccacaaggaagcccactggggacattttggggacattctctttatggctgacaagatagggatgaactcagtgccagaaccaggagagcacacagtagaagcacacagcagaaagcattctgtaacaaagcaaagcagctgattgtaacacattctgtaacacagcacagcacagcacagcacagcacagcacagcacagcacagcacagcacagcacagcacagcacagcacagcacagcacaggtgggtctccatcaggcatctttctccggaagagaacatcacggataagctgataagaagcatgcagggagggcccgctttcctcgtcctgttgtcgtcttgaggtcaacattttcccttgtacataaaagaaaccagcggatggagtctggaaatcagttttgattacgtgtaaaatgtcttctctttgcagatgttgacgaatgccaggcgattccaggactgtgccaggggggaaactgtatcaacacagtgggctcgtttgagtgcagatgccctgctggtcacaagcagagtgaaaccacacagaaatgtgaaggtgagagtatgtggggtgcaagcctggcacaggggtgctagcctggtgtgggggcataaacctggtgctgattttgaagttttaaaaaagatgcatctggaatggttaaaactaatgaccataatcaatatttcttaccttaatatgaaaatgaaggtgtaacccataacatttggtgttaggatcatgtgttatagccttaaaggatttgatctgcacaaaggcaggctacatctgattggtctcaatagctacaagcagggggagtcatttaacctctgataatttctttcataatgtaggttttcatttcatctgtgaacttgtttgaagaagagtacatttttgttctaacttatccgtgaacaaagtctgtgtcattatgaaacttaagaaatttctaaatgaatgtagcttcaaagatcatgtatatttagaatgccatatatgtgtgtgtgcgtatgtgtatatgtatgtgtatatgcatgtgtatatgtatgtgtatatgtatgtgtatgtgtatgtgtatgtgtatgtgtatgtgtatgcatgccatggtatgtctgggtaaggtagcttcaggtgtctgccctcatctgtcttatttgagacaactctcttggaacttcctatctctgccttctctctgcaaggggctacagaaatgctaccacattcgcctttagacagattttgaagatctgaacttaggccctcatgcttctacaataggccttttatccactgagccaccagctagcccaaaggtagtttctaaagacagtgccatatggattattctagttggttgtggaagagcagcctcatttactccagttaagatttttcttattcttttataaaaggcagtattttgttagtgtatgctgatcaattataaagcggggtgcctatctatgtagacaagaaaatggcaaagtgagaaatctagaatttaactgcacaaagtcaattggagtctaagtactgttagaaagtaagaactagtgtgtgggcatcgtggctcacactaacaaggtttcaccacaagcaaccacaatcccatgagttgttggataacaccagcctctatttcctgtgttcctctacttatgtacagtcagtctgaactcatctttacagtctgatgcatttaataccattcccagataatttcatgttccttacaacatgaaggtgagaaggacgtagttgattattttaaggaacaaataagttttttctgacactgtttttttttttaaataatatccaagtggtttgtgctacttcaatacaatgttaattatcaacctacttgcaatgaaaaggttcagaaaaatgcatgcacagtgaaggaaagtgagttctgaattagcacagaaagtgaatcaaacattcagtggtcttcagaaagggtgctactattccaaaatcctcctaggtttttggaagagttgatacttttgcctttttccccccactgctctctacttttaacttctggaataaactgcaagctctatgcaagcacgagggaagaaaagccagcctttgactgtaggtgagaaggcacagccactaactgattctagtggttgtgacatttccattacacatcaaacaatgagtttcttcttagtcgaaaatggaagaagtcttttctccatcacatttcatcaaaagagcatgcagagccaaggcagagctcggggagagacagggccgctctttatttctgctctcctccttctttgggaatgggagtcattgatataacataggcaccacccggagccctgaatccagtcgtgtcttggcttccttcctgcccaggcagccagctccatttaaacattgcccagagagaattatatgatttagtatttgtgatttgtgggaatggaggaattggaacaagggctgattaaggcctgaaatctaagggctctgtgaaagctttacttgtttataaagcctatttatttagatgtcttaaaagtagctattatcaattttctttgggtaatactgttcctgtatacaaaagaccaagcagtacttatataaaattatttaatttaatctgtatcaaagcataccttgaaataccagagctgtggctatgcccgacgtcagggtttgaagcaaactcatatctagtttaataatctgatgggtgttctaaataagaatgaaaccacggcagtctctcttgtctaccaaaacgtaggtatttaaatttcagtgttaaaaaaatgtaaagtggagtattagctgatttattttttgaatcatgcccttcctgtttgtactgtatgaagttccatgcttctgttcatgtaaaagaagcctcttgcttttaaatttcttctgtctgctcaaaactaagagaactgagtcactggggagatggtattcttgcttggaaaatgcaactcaaggctgatgattttggcaagtgtgatgtgactattgctttcaaatgcttgagtaagattcctaaggacagaaattcttccttctccactactgtcctccagacctgagcccctgagccttatttctaatatacttggcagattccttaccaataaatgttggtgagcagggtccaaagtttataaaatggtggtcggtttgacctgaattcatgtccaaaaactaggtgaactgtgaaaccaggataaggctgtctttggaaagaggaaagtcatctaagcagattattttctgcagtggcccagctctcatgtctctttcaaagtgcataattatttgttcgtttgtttgtttattcgtgcagagactagatttcatcatatagccctggctgcctacaattcactatgtagcccaggctagccttaaacttgtagcgatcttcctgcctcccctttcggagtctggattcattggactgcaccaccatgcccgccttcatttaaaacataataatttcattattgttgaatgtaccactgtaagtccaagagggacattaaatggggtgggttggggctggagagatggctcagcggttaagagctttgaccgctcttctgaaggtcctgagttcaaatcccagcaaccccatggtggctcacaaccatccgtcatgggatctgatgctctcctctagtgtgtgtctgaagacagcgacagtgtactcacagataataagtaactaaatctttgactgtggtgtgttgctttcctctcctgtgtcattgtccctttatgctgacctattgttctgagtttagggaacctttgctgtctttgaagtagaaagatgtctgttcacttaccagaacgtcatccttcaccactgtaaaaaggcttgatctgccaagttatatgcgattacgcacgagtagcttatgctggaactcaagcagaggggagagcccatttctttaaggtttgaaacccatgccttggtgccttcagggaggctgtgtgtgttatgtagctggtcctggtatgttctgctgaaggatccctttcccctcttgtggacaatatagactactgctcaagtcctaaatctcagcccaaatctggaagtagtatacatctatattgttcacgtgtgtgtaaagaagaacatctctcccctttctttggttaggggcccagttccatgaaattcctcaagatggcaactgcaactgtgtcttatctctcctgagccagcttgcttctaaaaatctaatgtcctcgttccattggacagcaggcaaatggttcttcagtgggggtgggcgggaaccaattccttcacatccaaagaggaagttggttcagccacttatcccactcagacatccattaatataaataaatatctgtgtggcttaaatgaagatgaggcactgaggactaagtacctctgtgcaacatgatgctgcacaattgggctgcccagctttttctttctgcaaacattatgttggtttgcccaccctgcacataaatagagacaagtgggtaccagatgtccttgcttgcccccctccccctccatgccttctttaacatacctaagtcacgtattctgtcttggttgttgggtagtcaggaaagttacatcgaagtttttccttcagtggctttacatgtcagatgcttattttaaactattctgaagagtctttgtccccagtctatttatatgacattttgtcatttggggtctgaagataccaaatgtatctatttattcatgcttgtgaaaacccccaatacatgttggcataatgtctttgctgctattacaaccctgctttaataaacccaaggagataaattattcataataggattaaaagtatttgtttttagtcagatctccaaaagtaaattaactttaaaataaataaggaatgccccgccttatatgaactgttcagtcatggaggtcggttgttcacaatggcgaacaacgaaagcttggaggtcagcaatgcaaaaataatgaaagccaacatcttttaaatccttcggaaagtttagaactttgaggttgaaacggatatattccctctgttgaagagggaagtgggcagagaaatatccaaacctatttctcggtcccataataaataatccttaatccctctgtcacctatttcactgtgttttaggtgcctttgttatttttctcatgcccgagtctgccagcagactctatctagcaatagtaatgcctgatgttcaccgcgaacttactataacctttggagctactgagaaaacaagataacccagtttacagaggttgttgtactgaattagcacaaaggagctggaaagtggcaaaaactaatatacttcacagctgagaaaaaaacctctgtaggagggccctagggactctccaggtaacaggagaaaacctggacattactgagatccagctggtcctcggacagggctgtcaatcacacagctggatgccagcgaggcacagcccagcagaggattctactcagccaagccattcagccctctctacgtttatgtattgtggcaggactctggaatagctatgggtcagaactgatgtcgtttcacagtccagtcactggacatggaacttcatgaatgaaaaaggcaccatctctctgccctgacgttgacaaagacagaaaacatgaaactttagtcttcattcttcacttcagccttcatgttcacaaaaagttttcctgtgtcctcgatgatggtagacatttgtaacctagagctctctggctcctggtgagtcaccatcccagctctttagtcagactgggcatctgaagcatgacacacagccagtgtccatgtgcttcgcaggaaactggttcacaagacctacttctttgaggtgtttacttccttctgaagtgtgttctgctgcctccctgaaccacacatttggagactcagatagtgggttctctgttgcattcaagattctttaaaatgggatttattctgtgccactgcactgaattaatccagtcaccaggactgtagattttagtagatgtcagaaagcaagagtccagggtaagcgggtagaactgaaataatccccttgttcatggaaggaggcaatagcagtactctagagcagtagttctaaagtagggatgtgctcaactgttcctatggaagaataagatgaaaacttaaagtagagaattaatggatgtggtgacaacagctttcatcccaacacgaggaggcagagtgaagttagctcttctgaacacagaagtatgacagaaatctaaaatatttactacagcatttgtggtagccactttctggtctgtgaaacaaattccaaagattttttttttctaatcaggaagtgtctctgaaagagtctccccaaaggcagagaaccctcaagccctcaaagacagttgtttatgttttcttgtttttatacatctttgacttctttgtcaccacataaggtgacatatgttctgatgagatgtaaagagtaagtagaatagcgaggaaggaaatggtgtacaagagagatctggtggagtcacacatcactcaagcacactgaccaacaggtgactgttctcctgatttctttcttcatgattttcaggggcctaggatgcaagtagcgtgacccaaagacattcaacaaagcaagtccagtaaaacaaagcatgtataataaggaaggtcattgggtacacagtgaatagtgttgagaaaagtgcatatcaaatttgaaaaggattggactagaccatcacatcttataccagtggttctcaaccttcctaatgctgcgaccctttaatacagctcctcaggttgtggtgacccttgattaaaagattattttcactgctacttcataactataaatttgctactattgtgaattataacattaatatctgtgtttacagatggtcttaggcaacccctgtaaaagggactttgaatcccccaaaggggtcacacctcatagcttgagaatcactgccttatgccaagagtgacctttaatattagtatcaatgaagacacataatatccaaagtcatcgtgaacgttttttttttgtgtgtgtatactcagccaaagaagacatactccctgccaggcgtggtggcacacgcctttaatcccagcactctggaggcagaggcaggcggatttctgagtttgaggccagcctgatctacagagtgagttccaggacagccaggactatacagagaaaccctgtcttgaaaaaaaaaacaaaaacaaacaacaacaacaacaaaaaacaaaaaaaagacatactccaacattttgtcaaccctgaatctatagaggaatagattggtaaattcaactctataaaaaaataaattccatgccaatacaagatggaaaaaagcaacatgaaagaaagaaaaaatacacagatgaagacaaatatttcaaaatatatataaagaaattctatgaaacaataagaacatttctaataaaaaaattaaatatcgaaatatacatagaaattctatgaaccagagaacatatctaataaagaaaagatcaaatatatgactgttgacaaaggcagttgttatttgactactatatttaaacatgcttttccttacatggaataaaatatgtaaaccaatactgagctaacttttttagctataatttatgataaaataaaattcaaatgaaaactataccactaaaggtgttagaccatggacatgatcacaaattccttataaacatatcaggaatattttttgtctatcgaaataaaaacatccatgccattacatccaaaaataagttaacctgttggatataagaattgactttgctatgggatgaaaatcaaatgctgcaatatctacatctgggctggtgaaaaaacttagtcggtgaagttgagttcagattcctagcaccacacccaaataagacacttcagggtggcggggtagggggtagggtagagatgggagggtcactggagcatttagccactcactccagtcaattaaggaaaaaccgatgtgtcagaaaggggagggcgagctggagaatgtggatgacaaagatgatggagatgatgctgactaggacagagaatagaggaaaatattggacattgacctctgacctccacatgcatacgcacctgcacatgggcttctgcacctgcacaccatgcatacatgcacacaccatgcatacaggcacacacacacacacacacacacacagagagagaggcaggtcatacttttaactactgtcatagttttattttcagagttttataaccaagcaagaggaaacacagggagagagatggtaagataggtaggaagtgttattcagaaggtcccggggagataggataacagaggacctgtagcccgcagtcagtgcccacgcatcagaacagcacgatttgtgtcagcccgagcacattaatgtctcagccttgatgcagttgtcctgcttggcgtttttggctatgatttccatgtgcatcataacatacagtaatttttatgtcacagtttattgagatttttgatgtaaccttttagtgggggtggacattcagtacagcattcaatcagtaagcttttttccaagctagcaaacgttttcaaaaatataattggcataccggagcatatatttgcataaatctgataaagctgatgaagacaatgacgtggtgatgagagaaagtagaaccagatggtcatttactttcggcttggtctcagcctgattctactccccatgtcccagttagtttcatacaaatcacagccatgaacatatgagactcggatgactaagtttatttagcataagacagtgattaggaaattattctttgctcgatccagggatatcctctcaaatatgagaaaccggtgctattcaccagggctagtgtgtcttcacatcctgttatgcagtactgaaaactggtaaagtaagcccgtggtgcttgtgtctgttgaagatcactgaaaaaacgagcctccaaagcacccttttcatagatgtaaaactacatgtatggtaatgtcagaggactgagtcccccatggagtgaaaggaccagacaggtgctttgaacctgggctttgatgttctaaattctaaagtagattctaaacctgtatctctattacctttaccaagctgctgcgttgacagatgccacaggcaagtcgccctcattttccctttaagtaattataacagacagttagaaaagggtctcctggcatggttggagagaagatagagacctcaattttgagtctcctcaaaatagaaggtgcagtaagctttatgccctcgaccaaaaggaccactcttgccagaatcattacttcaaaagtctgacttcttgagttgctgtttttcctagcatgagcatagaagctgaaaccagacacccaaatccttgctcacgggaagactgtactaaagacaaagaagagatgagacgcttgtaacctatgtagctgaacacaatcaaatcaataggaacaacaaaaaaaccagagtttataaaacgatgtcataaaattttattagtacctggaaagtcactaagatgctgctgtttgagcaaaactctgagagtgtgaaggaatcaagtatgggtgactaggaaggaagactcttgtgccattttgggtagtggccattgtcaaacagaggccagggcacagcagaagtttggaggagatgttaggagatggggggggaggggagtgagaaagagaaggaacaggaccccttcatcgtgaaggtaattcagtcttactgaagcctatgaagtgtttaagtttctatgaaaactgtccagatacatccctcgtgggttagcagcagagaattgtcacctacagcataatgtggtcaatggtgcagaatgacatgtcagcctattagagggatcatctgatgaggttcatctgtggataactttattattttttgtcattccattatttccttgtgaaaatcaaagtgtgcactttataggctgagcctgaaggtgacccttccatactaatatatccagttacacaatccactttttttcaattttttattagatattttcttcatttacatttcaaatgctatcccgaaagtcccctataccctccccccgccctgctcccctacccacccactcccacttcttggccctggcgttcccctgtactggggcatataaagtttgttagacctaggggcttctcttcccaatgatggccaactaggccatcttctgctacatatgcagctagagacacaagctccaggggtactggttagttcatattgttgttccatctatagggttgcagactccttcagctccttgggtactttctctagctcctccacacaatccacttttatatgtacacaaatagtgtttatatcatacagtaaatatacagctgctttttggagtgttggagattgaaaacagagccttgctcattctgagcatgtgttctgatttgcctgtggattcccccagctgtgtaccctactttaaaaattgacctgttacaagaattttttaaatagaacacagctaagaaaatacaattaagaaatgttctttataggaattgtgcatagtatgcatgttagtgaatgagcgtagagactccattcagtctcctttttctttctagaaagtaagaaaagcacagaggtagattaccactcctgacatcatactgcctcagaggaatgtagaactaagttcattttcacttgagaccatttatatagaagataaaaaataaattactcttagatgtatcattagagcgctgaggacagcccagcttccttacatttctcacgctgttttgccaaaatgctctttaaaatatcaacgttttacatcccacatgctaatgagaacaggagtgcacagtgctgaattcctgaaacgtcgccaagtccaaatggctatagaacaatttaactttggaatttcctgactttcgtgttggtgaaatttaagtttttatccaaccttaaagggagactttccattcatcatctccgtgttgggattttcataaacttgtgaaaatgggagattggaacaaaaaatgaccaagagtctgctggaatatggttgtggggtgagtgcttgctaagcgggagtttgatccccaaaactgggagtagaaataaaaaacaagaaagatgtcggaagatttaataggactcctctgctcttagaggcactgtcttacagatgagtagctttcaatctgttgaatcgtcagcattttaaagtaataaataataattggttcaatttatcctgaagtccatgttttaaatgtagtattgtttcctatgtgtcttaagtttggattaacaaagggtaacaaaatattctctccccccccaaaaacaatgattgtgcagttaaccactgttggtaaatggctgtgttttccaaatgacccattttagaatgtagatcaaaaactaaagctcatgttgtttgactatgttatcagtagcctttattttgaagtggaaatagtttccagagtgttgtcacaatgttataaaacatcatggtggcattgtcccttgctgccaatacctcatgcctgggttactccaaattagtgtctaggaagatgcagcaatgacttcaggtcagtggggaaccttttatgttattgctcaatagtagccttttaaagagaaaattattgtgaacataaaactgtggaaaaattctactagcatccacttaagctaatttacaaagactgtttcaaatgtactttcctatattgacagcaatagaaaaggggggatcaagaaattagatagatagatagatagatagatagatagatagatagataggtaggtagggattctttgctgatacacagacacagatttatagagactggttaatctattagtaaatagatgatagagatacagatatgtggatccataaatagatagtgataggtagatagatgatagatacattggatggatggatggatggatagatagatagatagatagatagatagatagatagatagatagatgatagattaataaatggatggatagataggataagatagaaaggtgatagatagatagatagatagatagatagatagatagatagatagatagatagatactgcatcatagccttgcagtgacataggacactgatgtgaagctatagactacagcccttttccacacagcccctggtgttcgccaccatcctggaaaaatgtcattccctcccattttttccatggctgctatcagtctcctgattttcacatagacttttggaattgttgatagtcattctctagtttctcccttctctgcttaccttccaggctcctttgttcctcacatactcatgccagacacaggcacgcagttccttagataaagcactctggccgagtcttgtgtgtgtgtgctttccctcctcctcagttactgttggcctgcttatcttggttctcccctctcagggtcccctggggaacctctgttggcccattctctctgagttctccttctgccaggcactattcaagttgtcatactgtcacaccatcttgtcctcaggtctagtactgttctttgggtcaccagtgctagcttccagagtccttggcttgggctcagctcatccctttgatatgctatttctggtcaagggaaatgtttatcttgtattctgaaaccagccatatcgtttctctttggtcgtcagatatttttctgttagtgttgtgtgcttggaatcaaggcagggaagcagagtggaaatcaagatctgcatgtgtaactattagctcaggtgacttctaagcacactggggttttctgacatctgccctctatgtccctctatcaagaaagtgggaagtatccggtgtgaactttttaaaacctcccattttcaccacatcctcattttctgtctcccttgtgtttgggtagatgtcttccaaattttccaaataaagttttcctcactcatgtaaccccattctctgtgcagctttgaacccctgcctccactagccattaattcaagctgctgacatcacacaactgaagccattcaaaagaccacaatactctcctgactgtctctcagtctcctctcaccgcactgtgtcctgtagacttccttctgtagagagattgttctcaagctgccccctccctgctcatggttgtctttccttttgtgacattgtgttagttgtctccagggcctggtagctttttcattagtgcacatgactcaacatcgtaggagctgaacattcaacagttgtcagagtgaagtcagtgaagtcagagatgctgtctcgtgctcaaactcttgtctcctgtcagtaatgctttaaaacacaggctctggcagaagcaaagcaaaagctgcaattttcaattcaggaagctggaaagatgaagaaggttcctgtagcagcaggggacttgaaatgggtatggctgagctgttgggctctctttacagcctttggtgtaggacttaggcagaacctctttttttcttcttgcttctactgtgatctcctctctgtgttataacttccaccctaatgattgtatctatcctgatggcctcatcctcccagactcttgactgactttcagtttaactgtttccctgtaactagagtcaatgaagagaccattggttttcccccctcaaagctgttctgtcttgctttactggtttgctaattctagctcagtaatgaaactggctgtgccttcctcttacccttccttctcacgttcacggtattcttgacatgagcaattcctttctccctgagtcttgatctcatcggctgaagcttggagacctttactgccccgtctgcattattaactctgccctgccttacttattagcacctgtagatcttcttcatcagcactgaagcttgggtcagcctccacctcactttccaagatccagttgccccatctttgctctgaaacagggacagcaatgtgttctaggtctttctctttaccttttcactttatcttctaaataaatgacctcaactcacaggaaagctcattcctcactcaatgggttcccttcatcgtttggatctcactatttcttacctggaaaacatttcacttcttcttcctctataggcaaaggctatgcaatagtctctaaggtcctttatcagatactgtgacttccaggtattcattctgagtgtcaaaactgagctggattagaattctgctataacatggtgttgtatttcagggtgatcaggcatcttatgcttcattttatatccatcttcttagcaaattgaaaattcttggtagttacagaccatgcataattagttcttggtatgtgacaagtcaaaggctttgaatcagcagtaacttcctgaatttgtaaatgaacagcatgcatccaatcgatacttcattgtttaaagaattaaaaggatttttaaaaatattattttaattattatttttattccaatcagattgcttgaaatattttgccttttaaggaaaatcagtgtcaagaagttaaagagtctgtgtttgtttaaactcccatctcctccaaccttttctacaaaacatcgatgatgtattgataactaaaactaatatctatgaattagagttgaaggttcaacaatgatcatttagaaatgatgtacctgcttttcctgcctttctgtatgtttttactgggggggggggtggaaactcacaagattctagagattgtatttttcaaatgactcataaatacattttatataagagaaaataattttatgctagtggctggctgatcttgagaaattagtgttttcattttttattgttatagtaacaacataatgagtaacatttcatcctaaatagataaatttagaaagcttaattttgtatagaatggcatgaaaaaaatgtcaaagacttcacaaagatcaagtaagaatcctggtagaatttctcttagcagggcaggaattcaattggcaaaaacattgatttgggggaaatttcatttgtttaaaatctggacataagaaaacaaggtcctatgtaaaaatgagtatggttcattgtcagtagcagatcttcgtccacagatgagcagctatttatcactatcttttaaaatctgtcctaataattggctcagcatctttaaatgaatccacggagaatgtcagagtagattaaagattactatctccacaaaagatgcaggaaaaacatgaaaaacaaaggaagctgaactttctagtgtcacttcctagtgtcacttcctagtgccacttcctgatcagaaaatctacacattagcaatttcttgaaacggctttcgccaccctgatcacgtgcctctgtgtaaaactacagttcatatcttcctaaataataaaagaatgtttctccaacatcaggaatacaacagagtctgctgccaccatgtctgttcagttgcagtggagactgtagccagggcaattaggtaagaaaaggagtaaaaagagtgacctagaacagcagaagaaaactacaacagtctctccttgacttcaagggatgaatctcagctgtcccagtggatgcatgaaactgtagttagtatttgtctatttctgtttctctgattgtctagatagctatctctttacatacatagtgctttccattcatatatatatatatatatgaatacatgtattcatgcatacatatctgtagtaaagtttaacttacacatgagacatgttaactaggtgtggtactcacattagcacaatattaagatccttatgggattcttgaaaacaggaaacatcaaggggacaaggcaggagaatgtatacagtgcaggtgtgctcagtaatggggtgtttgaatcccaagtaagacacagggttttatccctccactcaaaatgaacacaatggttctcttttccatttagtattctagatgaagcatgactaactggaatcagagaacactgagtcatggataagaggggtgttgtgagcaggctatatcagacatatagatacatgtgcatatgcctttacacagtgtcagaacatattgaataacaatgtatttacgaagtacagaggtttcaacagcaacaatgtctaattatctgcttccctcagtaatctggttgagatgaacacattcctttattccagttctagttactgattttaactcttatattagagctcacatacccccgtgtgtgtgtgtgtgtgtgtgtgtgtgtgtgtgtgtgtgtgtgtgtgtgtgtctgtttatctatttctctctctgcgtgtatgtttttattgggatacaaaatggataaagggataaaaagactacagaagggttttcagagattttagaagtaggctgataaaaatgccaacagagtctagattgacatgataacaaacctaaaccagctacaggtaaaaaggcaaggcctggttactaaccgcaatgaacagacgtttgggcagcaggaccagaggacacagagggatgagcagaaggcatttgagttgcatcagcaatagcgattagctggggaatagtagaagtactctgcatgttgacccttgaggtcggtggttgaaggggccattgacatcgtcttattggtggatgtctacctcttcatggggtgcatgtgagacagtttaatgaatccctctcatgagtctactataccagataaattcttgaccatggaatccttgatatggtttcagtatgctcatgtgtccatgaggtctctgtgtatcatgatatgttaataaaatggcagaaataagtcgtgtatcagtctgcactgtgtgggtgatgctggataggtggtggtgtgtgtaaacatacttaggctcacagtgatctcccatcctcaggttgtagtcagaagctgcttgtgagatggagtgttttaggatggggacaaaactgaaatacaacatttacatcaagaatagtttagtgcaggacacagcctggtctccacaaggcgagtagtgtgtctgtattgtggatggcatgctgagcagctaagataccacccaaatgcaatgagatctctgctaacaagcctgcaggatactctaaaatgatcttagagctggtaaactggttcatcattgccgtagctcaatatcaatatacaaaacgaattttgtagaccttgacagtgagcattctgaaattgaaattaagagaatcccattaataataagatcaaaagggatgaaatgctttgaaatcaatttaaaagtaatcaaaaaatagcacactgaaaactataaatattgttgaagtaaattaaagaataaataaatagaaatgcatgctacttttataaatcggaaggcttagtattgccaaagtgtaaggagaagacaaagagcacactgggaatggaactacaaagcccaccccagtgacacagcgcctccaagaagaccacgcctcctaatccttcccaagcagtaggctactctcattcatagcaccacaaaaatgtcatttttttgaataggcaaaggaattaaatacagtatctacaaagaagatacacaaaagacctaaaagcacaaaatgaaaatatcaacagggtatcattagggcacggcaaaccacactgcagtttgatagcactccacccctattttaaaaataactgccccccccaaaataccttcaacaaacaaacaagagcgaataataagtgtggctaaagcgatgagaaattgaggtgctcatacactgttggtgggagtgtaaaatatcactgccactttgaagacagttggtcttcacaactccttagatttcaggtgtgatggcaggtttgtgtccactggcacccaaaggtgagccacccagatatttatccacggtaggtgataagctgcatgctgtattcagtgaccccacggaacaaaacacaccacagcatggagcagctttgcaaatgtcaagctgcgtggaaacatcctgttacgagagaccacatacttcatggtctcctttgcatggactggacagaacagcccattgtgtaacaacagaagtctagattaatgcttttctggggcttacaggaggctgtggagagtgattaacaatggagtggaattagttgtagctgtggggggggggcagtgaaggtgtcataaaattgggttggagtgatggttgtgcagtcctgcactatatttaaaaaacacaaaacacagtagaatttagcgagctgagtgtgtgaactgttcagcaaaggggctgcttctcagttaagccgcccacgcacgacacaactcagaccggttcatatacattgcactctcaaaagtaggagaaaacatgcatgagtttgcagttgcaattcattttatcacaccagcgttccctattctgacttaaaaaaaaaaaacatatcaattgactgtacatcacatcccagctcacagatttacctactatacactaacatacattaagaagtagaaatttaatatataacaaaaacaattatatatcaaaaaagtttttcaggttgtacttagtatgtacaggcttttgccaccagtgggaaggaactattctatagtattttataaacgaaatcacttattttattcccattaatttttctggagcaggtgttgatagggggtggggagaaggttgaaaatgctgtgtccctgttacagcagagcatcaccagggcagtgttcttaggaatcagtggtatctgagatctctccactcactaagttagcaccatctcctgctaggagtagatcctgctaggagtaggacttacaagaacatgaggttctgtggcttgtcatcagaaagctatcagacggttctctttagaccctgttttcttttcccaaagccccatgttcagattcatcaactccccatacactctgatggtcctcttactttacctcctgtttcctggggctcttcctctgtctctgtcctcttatatcttagcctcttctccctagacttccatctcctctcttcatgaattttcctctaggtatggatggtttgcacagctgcttctttaaattcatctctgtttctcttttttaaactcccatccactgatacacctaatatgagttgtctactttataaaccatataagtatgtgtcttagtcagggtttctattcctgcacaaacatcatgaccaagaagcaagttggggaggaaagggtttattcgacttacactttccatgctgctgttcatcaccaaaggaagtcaggactggaactcaaacaggtcagtgagcaggagctgatgcagaggccatgaagggatgttacttactggcttgcttctcctggcttgctcagcctgctctcttattgacccaagactaccagcccagagatggtcccacccacaaggggcctttcccccttgatcactaattgagaaaatgccttacagctggatctcatggaggcatttcctcaactgaagctcctttctctgtggtaactccagctgtgtcaagttgacacaaaactagccagtacagtatgtgtttgggaacttagccctcagctgaactccatacacaaaatttgagttatgtagctcattagtctacttccctaacactagactctcctttggtgtggctcccccttctccatatcctgttccctcttaatcattctgcaccatctatctgtcaatcaaggttgatgtctaacacatcttctcagtgacaaagttctgtccttttgtcctgtttccttcttgacttgttttctttttcctcaagcctagcttcgggcatcctgcaatattgttccttcaggtaacactcttggtttatttaaaatctttcttagaaagtagactgatccttcggaataaaaagcaatgctctacaggtgatgctccaggatttggcacgtgtcttcctaattatgcaatgtatccccaaagtttctcagccatccatgctcatgcaagtcccagtcgtcaacagtacagtgtttcagactcacccacactcttctacttcctgttacgtatgcgtctaaacttagtcgtgttgagaactccaggcttatgctggtgaagacttattcaggtattgcttgtgagacaatctgagatgttaggatgtaaggaaagattgatggggattttcttggcgagcttttcttcctcttaaaagggcagagaccctggagagacaaccagtgttttactgcatggcctagtcaaatgtccagctatgcttgctgtagccctcttgaccccactggggaaaccagatgcaagatactgtcagagaacagaaaggctgtcacaggatgttcgggtctgtaactaactgcccgagcttccctattttccaaaaaccttccaggatactgagtttgataaaggaaaatggggtattaccagtttagccaagccaggcgaagaatttagttttcctctgtaccatgcctgtatcagttcatagaaccttagaattcgtagtaaagtaacgcagggagaagacgctttggacagctgggtctctaacagtttaatctgcacttccgtggaacacaggagaaagatcttcttgacccgatccgttctcagaatggcatcttgattctcctatctttttacaaggttaatgtggtggtagaacatcagcccaggtgtcttgtgaccccaacaggagaccctggcctaaccaatcctgaggtccatggtacctggactctcagcccaatgctgttaaacctctggcttgggtttagatcggtctttctgagatctgaaaactaaagctcccaactcacatgctttaaaggctcaaaatagtcaggatgtgggggaagcataataaatgtgcagaatggccttaccttaacccgtgaatagatctgccaccttcaaacacacttgcttatacaaacatcggtgtgtgaggtccattttataggccttcttccaaatctggttatcatatagagtcctgaagaaatgacttataagacaactaagttcaggtagcccactgatataaatgttaatgctaaattttatttgataaatacataataggcattattatactgaaatttacaatgtctggaccattattatgtttctgtgcttgcttgcttgcttgcttgcttgcttttcttgttttcagcgatctctataattcttaaaacttggggagtaatttgtttaagataagttttaaaaattcatattttttacaggacccccaaactcaaacagactgtgtatagcataaatctatttttaaccctatttttttaaggtttctatctcattctaaacacacagagatctttcagtgactattttaacagaaaacctcaaaattgaatgtcagaggatgctggttaggttttctttgtttttgttttaatcaagttaacaaataactagagccaaccagtaagatgataatttgtttgaggaattgccaccaacagattggcccatgggcatgtctgcggggcattttcttaattgatggatgtgagagagtgcagcccactgtgagtgctgctatccttgggcaggtattttaggtagtagaaaagggcacactgagtaagccagtaaatactgttcctctgcatggactaagtgtattggtgaccaactctgtgtcaccaacaatgcattgatcttaccctaaggacaggaaagcggttcctgccaggagtcatccaaccaagagcaagtacagattcggattctctacttcacactccctgagtcttctgtttcatgtcggtttggtatatgagtctgaatccttgcctgtctctgtacctgtgtctgtccatatgtctgtctgttgtatctgtgtgtctgtctctcccagagggttttgctttgtctatattgaactgtacagaaagcatagcatggggaaggagtagaatactttacagaaacctttaacagaactttacaaggaattaagtcactggctccaattgatcccaactgacccagatagcaagcattattgtttatcaaccaatatccataaatgattgctttctatctttctgctttattttgggaaattattcacagcttccatatttgctgatttcagcaaatgatgcacaaacattatttgggtcagggcatggaagaatacattcctcaagcttaggttgtaaaatcatgaggttgtttatatgaaattgtaaaagttgtttacatgagaaagccaaggcaagtaagaatgactgttccattgttctcttaaaagcaggttagacaaactatgtgagtagatgtaaatggccatcttaaatctgaagtgacctcgatgtgaggtccagcaaaggttccagtctcttagaatataagaaatatttttgtaatattgcattagcacccccccaacatgacgtcagctttagttcctgtctccgtgttccttccttgagttcctgtcttggtttgcctcaataatggaatgtatgtggctgtaagaagcaacaaacaatttcttttctttgtttttggtcagtgttttatcacaacagaaatattgtatttgtctatatcctagatagttcttccaaaaatgccttccctcaaatgtcaagcatctttcatttttgggttttggacaaaatcatactttgtgaggaaatgcatgtacatgaaaattagtgttcaaatgaacgacatgagatcttataatttcgtttatcctaaactacacaaacccttgaattgttggcatttttggacaatggagagaatatggatgcagggtttggcctgccctttgtgctgcctgcttcacatcattccattctcagttttgtctcccttggggagaggtgatttatcacagtacttgttgattgcagtctctctgcacctgcttcatctccatgcccctctccattgtctgaaagcatggagcaggaagatggcagcacgggatgcaacaggtcctaatttgcacagatggtttcattttgctggatgaaggctgatgggaaggctagtaccacattacacatttgctcctcgtttgtgcaggcaattcatgttaggattctgatctcttgggggattggtaggtgtggatttgtgcccctgtccttcagaagttattgaatctcagatgaagttagtattgtagatgatgtctgacgttagccttctttttgaagaacatatggaggagatagcaaaaccccacggttgcttcttgatgcaatcagttagcctggcgatttgtcagaataaatgggtgaagagtaaatgagtggacccatggagggataccaaaaggagacggctaactttgtgtgctattatttaaaactttgaatcgtttgtttctaatacttcccatctcatagttttaattattttctggttgagagttccaaactcgtatatgatgtctttggtcaaatattcacacattctcccctccagttctttctcttcctccccatctctccccgaactgctctgttttcaagcccactgagtccacattgtactccctgcatgtgtatggctgtaaggactctttattcctgagtagcctctcagggaccaaatccctaagaaaactgtctctcccttctctggccaatagctagctcctccactaagggcaggatttatggtccagcttccttctccataccgagttttggctagcttcatcttgtgcatgttgtcacaggccctggaagttcacgtgaactctctgtgtactgccatgctcaggacatactgtttcaccgtggaagttcaccaccctttaagatctttctactcctgtagcgatctctgaggcttaggggacggagcaggaatgtgtgtgtgtgggggggggggggtaattatggagtttaaccatgttcccttgcatttataattaaaacgcaattatttcccctgtcttttaaattgagacattctgaaagaatgtatacaacacaagaggacaagaacataaaagaaacaaaacgttcccatttactttgatttttgagtaattatgtttatgacttttataattgcttcctctattcattggtctttactacaccagttgctctgcaaacaatgctaacaattgggtatccctgcctgggtttcttccagtggctcatttccttttgtaaaagggattagccttcagctcccagtgctcctaattgaggttttgtttgactttccacctctctctccctcatgggattaaaagtgaagtacagggaagtttagagaaatgctcaggtttccctactttagggacaatttaagaaaaaaaaaaaacggacttttgttcttgtcaaaggaaacagcccattcccagagttaaactgagcagataagcacctcactaggagaagtgggcccttcccagtgcctctggggtgtttatttgccatagctctatattgtttcatattgaacttattcccagaatgtcaaatatactcatgttcacgtgcacctaccaaaagcacaccctacagccaaataggaaaaaaaatatgataccatttgttggttccaatgattattgtaaaaattagctatatgtttgtatttaattattccatatttaagaggtgattgtatatgtgttttctgatgggccctggtaggataattccctcgttgatatagaacaggaactaaaactttgacatccttacttatttgcaatttaagttgcatttgagcagaaagggctgtatagagttttgcttgagttggccttgtttggctgctctgggaggatgctgtcaactcagttcccagagatacgtgcgagaaattcctcagggcctgaaagaagactatcttcagggttatatgatccacctaatcagctgcgagtgctctcatagtttggaaatccttttgtttaacgaaggcctttctcaattatcttctcttgattagacattgatgagtgcagtgtgattcctggggtctgtgagactggcgactgttccaacaccgtgggaagctatttttgtctctgtccccgtggcttcgtaacctcaacagatggctcgcgttgcattggtaagccttgtgttttgaaggtacagtatgtggcttctttataatgacagaacagcccaaacaggtatgaggatggtaatgattataaaaccattgggcgaacggatgaaaggattgctctaaggccttaataatatttagcatcacggagggattgatagaccagatactgttcgtaaagtctttgctttcaggagccagctggcttagttttatgttgtcaggatcattttttttttggaagaaagacttgctcaagatgtaattgttgcccagcattgcaggcacagagcacaagaaagatgtaaaatctgttagggagctgggatatagtaatttatattctggtgctaggaatcatgaacccagacagcatctgtttacttaaagcttattctggtaaaaatgcttactataaagaagtaattggcacccctaattttgtgtttcaagtgtattcaaattaaataaagccaaatatacttacacggtctgctctgtttagagagatgaagctttgtagttcgcagacgtgatataggttatccatcaggcaacatactttgggtttctgtcttgtgagcccagagataatgaaatggcctttgatgtacaagcatggtagatttagctacctttatatttcttgccttgagcgttcagcctggttagttccaaaaccgaactgataatagctacaaatagatggagaaataagtacagtgacgatagcagcactcgagatttatgcatgacgagttagagaaagtagcctagtgtctgaagaatagagcttcatggtccagtgaagggaagaagtggggtacagagctctccctgagtctggcagtcagtgtatcagtacctccctgagggatctatggaccctagtgatggggccaaacgaaccagttcatgagctgaaagtacagagttaaggcgataaactgaaaagctcataccagcagtcaacagcttatggcttgaacctctttgataaatgcacttatctactgggcactaaactagcctcggccatccatcagcaagaatgaaaggtgtatatactcccattacagggccatgttgtcctcacatagtataaataacaggatgggcatatcagatataggagtctcgtttggctagtgacaactttgtgtcctttggcctcctgatggacaagatgatatggggctgagttagggtcctgcatatgccatacatccactactgaagctgagttctgggcctccagaaatccccttcatctcagaggaaacattctatccctgggggccagagagagggcgccctaaaataggaaagtggaaaatgactcccaggaattagaaagccagtgctaaaactaagtaaacagcctgattttttttaagataatccatattctattttgaatagggatgtgtttctgtgtgtgagaagaaaaacaaacccagcgttctaatgtggggggaggagcttcgggttttaaaaatccaagtgtttattttcttagatcgaaattatttatgatcgaatcatatgtcatgaatatatgaatccccctctgttttctgttctataaacacatggtgggcatgcaaatggcactgagctgggtgacgtcagaattttcttcagcctgagacagcacgctatttgaactttactctgagagtttgtgactctaccctgcttccttgtcctgtttcacacagttctccctacaggatcgtaagaaaatcagcaagtacgctgagtctaaaccaccttgtaaactgtcagcgagctacatcctttctctctcaggaacaagggaagagtttcatggggcagaggcatttagctagtcatttttaatcttcaaaaaccagagctttccccattccatttaatgctaatttaggaagacagatcctaacttaattttacctagtgtgttaatcaaaattttctttttaaaaaacccaggaaaaaatatctttaacatagaaactaacatttgccacatttaaaaagagttgaagtgtcactaataagtcttttctttaaaagcattttaatagcaagatttaacgagccttatgtcattttggaattcactccccttgggcatcattaatacctaatttccacaatttaatgcaggccccgaagaatgactggcacaagcagtaatgagtaatgaatatttgagccacagagagagagcaagccggatgcaggcagagggggctgactctcttggtgctcacacagctagcagaagccctcagcaggaacaggatacagcctgccagaggcaacaaaggtttagaaaaagacatgaaacagttagaaattcttgcagaaagtgatgtcctcacgacgttctgacgccttttcctccagctttccgtgtctcattgcgcagcctcacctgaaaagtctgaagataccaaccgcaaagtataatgtgaagtgtgtgtgtgtgtgtgtgtgtgtgtgtgcatatgtgcatgcacacacacgtgtaagtttgagggaagaagtgattcactactgaatcatttccctgtataatggataccattaagcgaagcaaaacagaaggctaagcctgccaggatggnnnnnnnnnnnnnnnnnnnnacttgtacaagcctaatgtgctgggttcgatccccagttcccacattaaagtggaaggggaaatccaactccatactgttgtgtctgaccttcacatgtagagagtaataacgaacaaagatgttttaaacattgctaaagtgaaactttttaaggggagtgctggagagaagactgggtgaattaagttcttgttccccaagcttgagggcagagattggcccccataacccacacaggagacaggaaggtggggcagtggtttgtaatctcagcagtcagagggcagaaacagggtccctgagcaggctacccagaaatagttatctccaggctcagtaagaaactctgctcaattaagtaagtgggggagaaactgagaaagatgcctttcaccaatgttgggcttctattcatatgtccacactcttgaacatatatccctttacacacatgagtccacacagagatgtacataataaatgtaacacacacacacacacacacacacacacacacacacacacacacacatgtgcacacgcacaaataaaaaacgaaaacaaacaaacaaaaaaccttggaaagaaaattctcaaggagatgaacactaacaaagatctcgataaatgcgtaagagctggatctgtggaaggaacgggagttgccaaacaagagagtcctgtgagccagtggatgctgagaggattccatatggatgcaggagacattcaacagagcttggctgggaaagaactgagcaagacactggctggcaatagagtaaaagggctgatgctgatgctgatgctgatgctagagttccctactgtctgatgatgaatacttgagtgtccatcaagagctcaaagcaggatgaggcatcaaaatagatgggcaagcagaggtatggggtggatcctgtcagtcaaggcagaagaggactcttcaatgacatagtttgatggcagtcgtatgctcttcaagtatcagagtgtagtcaatggtgtgtatagtgtgtaggagtctgggttatgtgtggtgctaatttctgatacatttgcaagaaaacacttgaggaaggacctgaaattcctcacaagtgtgtttatgacaggtaggtgactcaaggacaagcagtgtagtaggtcgtccacaatcctataaaggaagactgatggttttaggatactattttattactaatgattgctaatatttttttcaatttgaagactccttttgaatatcaaacttttttccatactcccatgtgatggggatgtgttgtgtgaattaaaatacataattaagtggctgcttagcatgctgtcctatttgtaaatgaagccctgcttggcaggcccatcaacacgaagaactgtttgtatgtagcgggggacatgcgtcactcactctccaatactcatgacaaatagagtttctgaccttgcagtatcccagcagaggactaaagggcggggcccacacagaatggcttcctgataaacttgctatctggtagtttacacgtacgacctcattccaaatggaacgttgagcctgaactcatgcagcgtgctgaagtgggtagagttgtcttggtagagcttctttagctattgatagccaatttcattgcgttcattctggtcagagaagtctctggtgtttgctgtcagcagagcaaatgcttagttttttttttttttaaaggaatgagctctcaagtctgtggctggtagactctatgcctatgaaatgaaactcagtggtttggtgttcagatctctcctcacctacagaattaattctgatgttactgtcagtttctgaaaaagctattaccattctactatggggctagagttattgaaagcttttaccgtggacctctattagtattatttgatatagtttgggcttgttctttcttctcccactttggatttactgtggatttcttaggccttagcttgtcttatgacatggctagaaatttctggaaggtttgaaggtgtagaatggtacctgttattctgtttatgccttcttctagaccccttattagatattccccattttctttcatctcctcatgtcttaaactttttgcagcatctcccatctctgtctatcagaacaacattgacgagaatgtgtatttacaaacctccccgaccagtaaccactctctccattcgcatctggcagccttagtgtatgtgtgaggctccttgccccagctctggccccttccagacacagagtacatagagcttgtctaaggcaattctctccttgtgtatagcattttatacagcatccataggttaggctttcgttgcttaaacattaaaaatgatctagatactaattgatctttaactgtgaatgatttaaaatggtacctatgtgtcaggttgatgttgtcattctgatatcaaacccactgtttatttccttttcttccctgtgtctcattccttggcgtgggtcacttctccgttactactctgttttctttgaagttcgtggaactcctctgagatgtctccgtgttgtcctctacttgggttgacttggtctagctgctgttgtatctttacctgagaaactgtgcttctttgaaaggtttcagagcagaagcttggtgtgagttgcaacgtcaaagctgtttagatgggaagagcctatgattataatatcttgaggccactcctccatttctccatgcagaagcagcacagagatgggcagtctccactgtgctccctagggtgctaacaccctcaggcccctgttctttgaggcgcctgattacactgtgctgggtaggatttggactttctgttttgtatgctttgagccttgtgaaactgtaccagacgcttggtgtatctgtacttcattagaagcttaaaagtgaaccaagccatttacacatagaattcccaaatctcctgtctccatnnnnnnnnnnnnnnnnnnnnacacaagcaagacaactcttcctcccctttgacaagggagaaagccagggagaagaaattaatcaactgtgttgctttttaaggaaataggctaccactttacggaaggattagagtgatgctctgtgtgtggacaacacgaagagctgtgggtgtccatgcgtcatgaaggcattttcacccaaggagcagtgctgtggcactatcatccagagggagaggactgtgggcaggagccccccaacccccccaccccgctttttatcttgcttttcatgtgaagcagagtgctttttttattatgagggatgtttctgggagacagtctactactggttggcaaaacaacaacaaccaaaacaacaacaacaacaacaaaaacattgttttatttctttttcccaccagctctgatctatgagtaagaaatattaaatacagttatggaagtaaatctaggtctcttgactcgaggctgtgattttgatttcgtattcaaacatgctacaactgccttagtgtagaaacctcgccaaatgtcacattttcatcctatcttgctgcactggttggatgctagagtatgggggattagtcgtaagagtttggggctttcttatcttcatttacatcttgttcccaagaagtacagcaaccaagtagagctaagaatatgagcctttggctcccagaatgaatggtcttaaatgtgttcccatggctcactttacaatagacctgggaagtcactcacagacgccaactgttcaaacttagctcctaagagtcttagtgtctcccatggctttacatgggatgcatgtggccagttctgtgctttgctttaaagcaagctgaatgtcttctgtaaatgagaggatgtgttccacatcttactggctatctgcaagacagcttcaactgtgtcctgctgggttggaagcaatctgagaatgctatggaccgtttggggaaataatgtatttatgctagactgtgtaattagagccaggaatgtcagctgtatccattactggaattatttgcaatgatttttaatttaattttaaaaatatattttatgagtactgtcaatttacatacaccgtttctatccctctttccagctcctcccatattcctctatcagattaatgatctctattactttaattaatattgttaaatacatgtgggtctgcacatgtgagtgtgagtgtgtgtgtgtgtgtgtgtatgtgtgtgtgtgtgacttactcagtccatttagtgttgcttatatttagttgtgtttaagactgatcaactccggtctgtataaactatcaggaagcttgtccctggagagaactaattttttctctctgttggcatcactggtgtgaggctcctgaatattgcctgtaacttcttatgatactagagaaaatgtctttaaataaccaggcatggtggcagacattcatgatctgagcacttccgagactgaggaaggatggtcaagtttgaagtgtctctaggctccacagtaacgttgagggctgccttggctatcagtcataatcctgggcttgggcttggtttttttcatttatttgtttgacaaaggatcttgatcacatttcagtagtacttagctaacttcatttgttaaaagaaaagtggttgtatatcaagtttgctgatgatttggggtttttattcctgtgtgatttggaattgagagccttttgttaccattacggtttttcttcctgtgttttctacccttctgattctttctcaatttagtcgacagggtgcgctctatcagactcaaatctgattgtgttaatttcctaccccaaatccctcagatagtgtactgagattttagcacaacagattttgccaaactcagtggtgcttcagtctcctcgccttgctttgtttcgcatctgacttccttagctaccttgagctcttacaagacacctcatccggccttacagttttagattatgtatgtgcgctggcaacttccagatacacatattccaagtttgtttattcaacagcctaagtgtgttgtggattacagaagagccttgcctggtaccctctcagcctgcttatttcctattcattgacatctgagcagtccaagtcgagactcaggaaatttccagcactctttcccttacatccagcatataagtgatttcccattaggtctgtcttccaacgtgtctgccaagggttcttacaacacaacacagtccactgctgctctcatcaaagccgtggctctcctaaacatctcctgtgtcctcttgttgctcttccatctcttcttacatcagtcatgatcctaaagatgtcagccactgccttttgtctatttgaagccatccacaaaccttcacaacatggccttcaaatcccaatgaccttagggctcctatgacaatacccatcttctcttcttaagacccatgggaccctgttctttgtatggctgtgactcattctcttgttcccttgcaagctgcttttgcagttattgccaggttttaagtgggcgctcagacatcggtgtcttagggggcttctgactgatctttcagtcagcaccctcgttagacattgttgcaaagctaataccggcatagatctcagtggcagacctcaggacacaggtgggtcatgtttgatgctggtgtgagatacattgtaagctctaggccaacctcagctacatagtacaaccctcacccatccccaactcctcaggttcaaaaagtgtcttgatcaagcgcacgtgttcggttgccactatttcttgagctccagacctatttggtttgtcaagggaagcttgcctcggatttacatgcctctcacttttgacttagagtcactaatcataggaacctttgctgacaaaaaggagtagagcgctgatcagatgtgtaagaattaagaggcaaaggaatgaactggtataaaaaatgattaagtcagaggaattcacctcgcctctatttgcctaacatgggaaatgattgctgcaagacctggaggtaattctgctgtgtctcctgtttgtcctttacatcttcagatcagagggctggaacatgcttctccggcctggtgaatggccgttgtgcccaagaactcccgggccgaatggcaaaagctcaatgttgttgtgagcccggccgttgctggagcatcgggaccattccggaggcctgtcctgtcagaggttccggtgagtggcaggctactgtctccttggcaccaacagagttgaaaaagtcaatgaccgtgatgcactttgcccttctccttggaagcaggtcagatggttattttggatagccggcagcttatagtgcaccaggcctttacaatgttttctttcctttctcacgaccttgagaattaatccctctcatatcctgtgcattataaataagtttgtactgggaaaatccccttaggatgaatgagaagttcctcttgctgtagatagcataaatagtaaagtttgattagagtttccaaaacaaatatttttgttatctttattatgggaaaaattgagatacagtctttgttctctcaaaatcatgaagccataatatactaccaagatggatctctaatatgctatcctaattccatgaataattaataaaatatggtagttgcttctttttatttagtttcaatactcatacaactaaataaagaatttacaggctacctgaatgcattcgactaccaaaattcattttaaaacattattctgcacatatattaatatctaactcctgaaaaatgaataaaacagacataatattcagttagacataatactgatgagaattcaagtaaaaccaaatatgtagactgagttacccaaagcttttcacctgctcaagtaaatttcttgcattcatagttacgtctggacttttatgagttatacttagagtgtaaagtaaaaaaggttcacacaaaggactctttgtttttgtagcttggttaaaataatgaggaccgtaagttttaaatatttttgaaatgcctataccttgttcttgttactacacagcactgaacatatctaataacagaataacctccttattcgtgttgtatagaaaaagtgagcaaaaaatgatccatgacaactacttctatgatgggacaagagctctatttgtgtttaaccaaactctcttttcttacagaggaatatcgtagactgtgcctggatggtcttccgatgggtggcattccagggagctcggtttctaggcctgggggcacggggagcaacggcaatggctatggccccggtggaacaggcttcctccccatccctggagacaatggcttttctccgggtgttgggggagctggagtaggagctgggggacagggacccatcatcacgggactaagtaagtaatcacacttcctgcacattcttgagttctcagccttacgtgatactatatcagctaacacgtgtgtgtgtgtgtgtgtgtgtgtgtgtgtgtgtgtgtgtgtgtgtgtgtgtatgtaccaatattaatttaagaaaatttggtaggaaagcattttatctattcctcacaccttttgataaatcggaacaaatgcgtgacctaggctcttccaaaatacaaatgcgagtccaagaatatccgatctagatgacatcactgcaaagcacatttgggtcttggtggagttcgttcatctggcctatttcactgctccactcatatactgcttggattatatcccaagaccgggtctcaagggagagaaagcaagccccgctctgtgcctctcccagcattctaaagtacacatcttctctaccacacactttgccattgttgtcaaattgcttgaaactgagaaccgtgggctccagagtggaattggtgcccgattgcttgacgtttaagcccactctttcaaaagcacagttcttgataatattttataatgtcccactgtgctatgtttattctttctggcatactgcctacttgctacatctaaatattcaacaagttccaaaaaaaaaaaaaaaaaaaaggaaagcactcaaacgtatggaagaacattcctgacatttttcaaaaagacacaagcaaagtttccagatgtgtgacttacagatgcaacttcaggcctgtgcctcaagtatttatttttaagatcctccatacaaaagcttaatagaaaatgtgaggctcacaaagaatgactacgagaaaagtatacatgtatatttttcataaccccccaaattgaaaaatataatttaataaaatacagagtaatgcaggcttctgatacaaatttaattaatttctattaaacttctaaaaaaattagtttgcatatataatacatgttgtaatgaccctgtatgctttgtttcaactttccgtagcaattctcaaccagacaatagacatctgtaagcaccatgccaatctctgtttgaatggacggtgcatacctactgtttctagctacagatgcgagtgtaatatgggctacaagcaggatgctaatggagattgtataggtaagttcacattctttaagccttctccatctttctttagttagctgggagcccatacaaacaaatggggctgaatacaaatgtttaaggtctgttgaagtaaaaggaatttctgtgctgttttcctgccactctctgcagcctggggccccttaactggttgctgcccttatatcccatcaaaaattccccatcccttcttttcctagaggtaatttctgtctcatgtttctttagagagttgcctatccttaatatgaattaaaattttaaagtgaatgtatttagaaaacaatattcattcaatccatccaaggtgacaatggacaacgaactataaatatttaaatattttggtttaaagtcttgagaagtactgggtttgactgtatgactgcaaacattaacatcacttcttcatcctctttgtcttcatccacttcctccttctactcctccttccttgtgtgtgttttgtttgttttggtttttgtagtcattgttttgatttggttttggttggttgggtttaggttttcttttgtagttgttgttttattttgttttgggattttgtgcagtttggagaggggtctgattttttttttaagacaaggtctctctttgtagccctaacagtcctagaactcactacatagaccagaatggcatcaaactcacagaaatccacctgcctctgctgcccactgagtgctgagattaaaggaatacattaccaccgccaacaattattaattccttagatactgacgggctatatctaacaaatacagagggctttgggtatagctcagcaggtaaagtgttgactatgtaaacatgaagagttcagatccctggatgtgcacatgagaagcagagaagtgtgtgtctgtaatcccagcaatggggaagcagacacgggaggattcctgggacctgctggtcaactggtctaccctaccagtgatgtccagattcaataagaataactatcaatggagaataattgtgagcgacagggatattcaatctttggcttctatgcacatccgcatatatgaatgcccacacagagagaataaccataaataaaatgttttaaaatataataacagaagcaagagagacggcttagcagttaagagacttcctgcttttccagagggcctacatttggtgcccagggcccttgtcaagtagctcacaatctgcctgtaactccagttccaggggatctgacagcctgttcagtccttgacaggcactcattcacatgtggcatacattacacacacacacacacacacacacacacacacacacacacattatttaaaaataaaaatctaaagctaatttaaataacaatataaatattgcatatcgatgtaagtaccacatgcatgtgtaaaaattgcatattctaaagtaaatgaaagtgtactgctaattcaaaaaataaaaaagtgtattctctgtgtcagtattattcagcttggtaagttgtttgagctggacagtataataaactcaacatttagtcataaaaatccccataaataaaatacttgagaagggagaggacgtcttgaaggctttcagaatgttgtgaatcttctctactatttcattcaaggccggtgagtggtgatgcatagatcttatctgtaatgtggaaacatcaacaaacctgctgtgtgttgtgctgagtccactgaccccttttgtgtattgagtgaagtttgtaatgtgccttggatctcaccagagatagaacggctccctgtgttacaagtgattccacagtcaagatatttcaccattattttaaacagcaaaaacagaggctgaagagatggctcagtggttaagaacactgactgctcttccagaggtcctgagttcaaatcccagcacccacatggtggctcacaaccatctgtaatgggatctgatgccttctggtgtgtctgaagacagccacagtgtactcacattaaaatcaatcgatcaaaaaataaataaataaataaatctttaaaaaataaacgaataaaatacatcaatctatttttaaaaaaaccaaacagaacaaaaatctgaaaacccacatatatatatatatatatatatatatatatatatatatatatatattatcaccttcagactcattacaaactctgttacacttttagaaaattggcagtattactttttaattctgccacagtaaaaacttaaataccaaaccctgacctgtaaatgagctttctaaaatctctaaggaaagcgatgcatatgaccctttaccatcaactaggctttttaaaaatttccttaaagggacaggttcttgtttttcttcaagaaactgacaaattcacacatttgaagagctgtcatttgcatggcagctaatctttgagtaaaaatagcattctgtgataaaatgtggcttaccaatgtgcagtgttgcaccaattcatttctgagacacgtgtggtacttcagtcagcaatggtgtgtaacatgcatcgctgtcatcagagattttagaaagcacattggcaggtcagggtttagtatgatgagttttcactgtcacaaatgaagccctttgctgaacctggcttttctttgcactactgtcctgtgtatccttggtaatgtggcttccatttgtgttcaggtatttgtgcttaaagcaccgctttgtcctgtatcacagaaaatgtccccacagtgaaaaaggcagtggcatcaagtggttatgataacactctttaaagatttatttattcttatatgcattggtgttctgcctacatgtctgtgtgaaggtgtcaggtctcctggaactggagtgacagacaattgtgagctgccatgtgggtgctgggaattgaacttgagtcctctggaaaaacagtcaatactccttaccactgagccatttctccaaccccatgaaaaagaaacgttttaattgtgtttctgaaatcccagtgacttccaggagcccatagaccaaatcttgagaccagttgttatagagaatccccaactttgccctgaaccatgtatgaaccagcctttaccagtgctgtgattaatggcgtgtgcctataagccattttctcacaaaccaaaaagtagtcttggagggtctggtgtttctaaattctatctatttgatttagagttatggatggtgacatgatagtaaaatggaagccaatgtgggacctctagaagcaggctctacagtagctgggatcatgatctcttgataaatccgaatttccttggggctttaaaaaaaaagccacactcagcacatctgcctgtccctgctcaagttctgaaccactagagagaaacacatatgtttctctcatatgttgttgtacagatactgaaaattacatctccatgtgttgtatagtctccacatttgggcttaccaaggctgaagtcctgaagaagtcggccatacttttatatattagtcaaaggtgtatttacttgtccaaatttatactcatgcctgcagaggccaacaaggctcactgaaggctttgggttctcccagttgatttatctttgcagacaccactccttgatcttcatcctgcagaagccattggcatgactgttgctcacatcatggaacgatggtacaagagaccacatccaaccagttgccctggagttgagtttgataagtttaacattgtagggcctgatatgttaggcactaggaaggaagggttcttgttttatctcctattacttctgcctaatgtggtgtggagactgtatatctgcataacttaatatgttgggggaagcccagagcttctgcactttgcccaattacacatggctgcactttagattcatcattcagtccttcagcaaggaaacctcaccaggattctccttcacactattataattcacagccatagcttaacaatgaagcccatattcaggaaaaaaaaaggagttttcagtcttttcatgcctttctggtgtcagcttttaaccattttgagttcatgaggaacaagttattctgttagaaaaaaaaaaaaacttactttagtactcatgataaaaatggtacctgcttaaaatatgccagtgttttgaggagtgataaactgacttttatctgagaacttctttacatgcttgctaaagacataaatcatatgttaaacattaaaaaacaaagcacataaacattaaaagcaagaaaaccagagcttgacccttatttcttccataagaatttctcctgggtcctgagaacagttacattccctcccgtatttctcttcttctcttgttcttctgttaacatgaaattcggcaatgcctagtgcctgtctttaaataaatatttaaactcgtggtgtctgaaattttaataactttaataatcatttttttcatgattcttttcatttgttttcagagtcttaggattcccatgaacttaacactactgagtccttaatggaatcgtagaaagaaaggaaggaaggaagaaagaaaggaaggaaggaaggaaggaagaaagaaagaaagaaagaaagaaagaaaggaagaaagaaagagagagaaagacccaaaatatagtgactataacagtcgttgtctctgtccctgttcctttaaggtagatgtgatcactttgcggtactggagtgtgaggcacatcatgcagaagaggcatggaatgcagggttcagaagataaggctggggatttgtggtcactctaaatccaaatctctagctgccagggctggaacttaccgttggagtgccagcctacatgcttgaggccatggacctgattcccagaactaccaaagataaataaaaaggaaagctaaatatcccgatcctgttaaacacacagaaagaaagaaaccgagcttaaagggctcttggaattataaagcaactcaattaatttgctggtgaggaactaaaaatatcagtgagtgagtggatacagcctattggtcagctggacccttgtagaagactaaggagagagctttgataacactgaatgaccagggggtgggaagagttgtcatggcaacaggaagccatgggggtgggttcttaagagagaaagatgtgctgagtgacactgtagattcttccatttttccatggccccctagacaggtgacctggtggggggcgtgggggaggttggttgcttgctctcttagagacttcatttaaacacagtttaacactgggctttcaacaagagacagccatgaatcacatttaattgttgggcttcaacggtgcacatctagataaccgaggtgatttttagcagtgcaaagcagaggtgcggtttcattgtggaaagcgctcagattgtacctgatgtgtttgctaatgctctaaactctctcttcccccttctgctccattcctttggctcagtagaattgatgtatcaaccaaaagtgtcaatgtaagtgagtcttaaggggctgaaagggccctgggatgaataaaaaaaacgcacttaatcctgttagactttgctgtcttaattgtattcaccgcgaggttttgttttgccctccccctcctttaccagagagggtgtaattgcagtccctcagcaagtttatagaaatgaggctggtgtgtgtgagagagcgcagtccctctggcagaaacatctgtgagaggagcaatctgtttattaacatggtcaccctgggttgactgcattgttctttcctgcagtctagctaaaattgtaatgctaatggattctacatgggcctgagatggcaaaacagtatggcagcttttttaacttgccagcattcagaatattacctagtgggcatgtctaagaaaagagaggttcaatgcacactggcccagtgattttacctgggatttgcctggtcagatttgttcagtctagtctttggttttacaaacccaatgtaatggattcgaatttaactacgcctaaggagaccttacatggaaacttccaacttactctggtttcagatcagctaataattgcatcagattttattttctgtgaaaaacaaaaatcctcagagccaatcttaagactcttaggagatctaaagttaatcggggggggggggggggaatcgctgtttaattggtttttgttgtctgtatactttatgtttgttactgcaaaataaaacctcggtgaatatatctagctgtttatgtataaacaagtctgcaacagcgtaacaaagaaactccgtagtccatcagttcctttatttaaaactaacagtattgaccacatgtagtgtgtgtgtgtgtgtgtgtgtgtgtggtgtgtgtgtgtgtgtgtgtgtgtgtgtgtgtgtgtgtgtgagtgtgtgtgtatgtgtgtatgtgtgtgtctttacaaaccatccattgttcacatgatattgtccaaggccttaggctattaacttgcctagattgctgtagctgctgagtgttattgtctgctggaactcacagttgttgcttttcgaggcctgtgcccttaatcactgggcattattccagctgggaaaaannnnnnnnnnnnnnnnnnnnnnnnnnnnnnnnnnnnnnnnnnnnnnnnnnnnnnnnnnnnnnnnnnnnnnnnnnnnnnnncaaattggactctgtgtgtatttgatgaaaggaattttcattcatttataaatactctgctatttagactattaccacggcctggccttctctcaagtttaggaggctaaatgcactttaaacaaacatttctacaaattgagtgacgtctgtaatggtttcttttgctgctcgcatatgttgatgaatgtacatccaatccctgcagtaatggagattgtgttaacacacctggatcctattactgtaaatgtcacgctggattccagaggactcctacgaaacaagcgtgcatcggtaagacagggattgtgtgcggaaacggcttctctgtgaagtagagtcagcaaggctgttgaagttaaagggaacttattaaaatgagacagggattagctaagcactgttacgttgtggaattgttttaggacgctcttgaagaatctcccattaaacataagtaccgggtgcgtgtataatccaggagatgtcgcatctggctcctaaactctttagtctgctttctttgcctataaagcacggcttcctttctccaaatgacgtcagcattgccgttcactgaatttaagatttatagtcattttcaactactgggtttttaaaaaaaatttattagatattttcttcatttacatttcaaatgctataccctccccccccaaccccagccctgctcccctacccacccactttttggccctggcgttcccctgtactggggcatataaagtttgtaagaccaaggggcctctcttcccaatgatggctgactaggccatcttcttacgccgtactcacaatccagcacctaatctttccttgtctgtattcagtctcattgcttcccccaccaacatcacccaaaacctacctccctgctgactcattgcagaaaccctttaccagaccagttcagttgttttccgtttcctgttcatccgcacactgttaggtgcctggatggactttctcaggcagttgtccttgtattgccctgaaaccagaaattcctcagtttccttcactgacccagcattgagttctgactttaaggcctttgtccactatgccaaaaaaacagctgcctcgataattctagcctcctcctacctgctcttaggctaaccgcaccccatgttcttttccctgtctttccctcttcatccactatctggtaaggaaaaagaaaatgcttacattttctatccaaaaggaaaagctagtgagaggtgaggatgttgcatcatcgtagacatcacgtgactatttcaaattgcatgcattattttactgttccttcaacacgcatgacaaagaaagactgtttggctctctttaaccttgtcagatatcgatgagtgcatccagaatggagttctgtgtaagaatggccgatgtgtgaacacagatggcagtttccagtgcatttgtaatgctggctttgaattaaccacagacggaaaaaactgtgttggtatggaatttctcttcccttggaaaaaaagacttctagaagatatacattttatttagagccacatagaggatgcctacaaggcttccatttctcatgggtgtaagaaagttggtcacattacctaggcaaataaaatatgaaagcatttgacatgaccagaaacttaaagtgtcagaattagtgagcaatgaatgctacagccacacataattcatgacttgctgcatttttcctatgctgtgcatatttaaatatacatagcagttattctccagcaatgtgctggattttcttttttttttttttttccattttttattaggtatttaactcatttacatttccaatgctataccaaaagtcccccatatccacccacccccactcccctgcccacccactccccctttttggccctggtattcccctgtactggggcatataaagtttgcaaatccaatgggcctctctttccagtgatggccgactaggccatcttttgatatatatgcagctagagtcaagagctccggggtactggttagctcataatgttgttccacctatagggttgcagatccctttagctccttggctactttctctagctcctccattgggagccctatgatccatccattagctgactgtgagcatccacttctgtgtttgctgggccccggcatagtctcacaagagacagctacatctgcgtcctttcaataaaatcttgctagtgtatgcaatggtgtcagcgtttggatgctgattatggggtggatccctggctatggcagtctctacatggtccatcctttcatctcagctccaaactccgtctctgtaactccttccatgggtgttttgttcccaaatctaaggaggggcatagtgtccacacttcagtcttcattctccttgagtttcatgtgtttagcaaattatatcttatatcttgggtatcctaggtttggggctaatatccacttatcagtgaatacatattgtgtgagtttctttgtgaatgtgttacctcactgaggatgatgccctccaggtccatccatttggctaggaatttcataaattcattctttttaatagctgagtagtactccattgtgtagatgtaccacattttctgtatccattcctctgttgaggggcatcnnnnnnnnnnnnnnnnnnnnnnnnnnnnnnnnnnnnnnnnnnnnnnnnnnnnnnnnnnnnnnnnnnnnnnnnnnnnnnnnnnnnnnnnnnnnnnnnnnnnnnnnnnnnnnnnnnnnnnnnnnnnnnnnnnnnnnnnnnnnnnnnnnnnnnnnnnnnnnnnnnnnnnnnnnnnnnnnnnnnnnnnnnnnnnnnnnnnnnnnnnnnnnnnnnnnnnnnnnnnnnnnnnnnnnnnnnnnnnnnnnnnnnnnnnnnnnnnnnnnnnnnnnnnnnnnnnnnnnnnnnnnnnnnnnnnnnnnnnnnnnnnnnnnnnnnnnnnnnnnnnnnnnnnnnnnnnnnnnnnnnnnnnnnnnnnnnnnnnnnnnnnnnnnnnnnnnnnnnnnnnnnnnnnnnnnnnnnnnnnnnnnnnnnnnnnnnnnnnnnnnnnnnnnnnnnnnnnnnnnnnnnnnnnnnnnnnnnnnnnnnnnnnnnnnnnnnnnnnnnnnnnnnnnnnnnnnnnnnnnnnnnnnnnnnnnnnnnnnnnnnnnnnnnnnnnnnnnnnnnnnnnnnnnnnnnnnnnnnnnnnnnnnnnnnnnnnnnnnnnnnnnnnnnnnnnnnnnnnnnnnnnnnnnnnnnnnnnnnnnnnnnnnnnnnnnnnnnnnnnnnnnnnnnnnnnnnnnnnnnnnnnnnnnnnnnnnnnnnnnnnnnnnnnnnnnnnnnnnnnnnnnnnnnnnnnnnnnnnnnnnnnnnnnnnnnnnnnnnnnnnnnnnnnnnnnnnnnnnnnnnnnnnnnnnnnnnnnnnnnnnnnnnnnnnnnnnnnnnnnnnnnnnnnnnnnnnnnnnnnnnnnnnnnnnnnnnnnnnnnnnnnnnnnnnnnnnnnnnnnnnnnnnnnnnnnnnnnnnnnnnnnnnnnnnnnnnnnnnnnnnnnnnnnnnnnnnnnnnnnnnnnnnnnnnnnnnnnnnnnnnnnnnnnnnnnnnnnnnnnnnnnnnnnnnnnnnnnnnnnnnnnnnnnnnnnnnnnnnnnnnnnnnnnnnnnnnnnnnnnnnnnnnnnnnnnnnnnnnnnnnnnnnnnnnnnnnnnnnnnnnnnnnnnnnnnnnnnnnnnnnnnnnnnnnnnnnnnnnnnnnnnnnnnnnnnnnnnnnnnnnnnnnnnnnnnnnnnnnnnnnnnnnnnnnnnnnnnnnnnnnnnnnnnnnnnnnnnnnnnnnnnnnnnnnnnnnnnnnnnnnnnnnnnnnnnnnnnnnnnnnnnnnnnnnnnnnnnnnnnnnnnnnnnnnnnnnnnnnnnnnnnnnnnnnnnnnnnnnnnnnnnnnnnnnnnnnnnnnnnnnnnnnnnnnnnnnnnnnnnnnnnnnnnnnnnnnnnnnnnnnnnnnnnnnnnnnnnnnnnnnnnnnnnnnnnnnnnnnnnnnnnnnnnnnnnnnnnnnnnnnnnnnnnnnnnnnnnnnnnnnnnnnnnnnnnnnnnnnnnnnnnnnnnnnnnnnnnnnnnnnnnnnnnnnnnnnnnnnnnnnnnnnnnnnnnnnnnnnnnnnnnnnnnnnnnnnnnnnnnnnnnnnnnnnnnnnnnnnnnnnnnnnnnnnnnnnnnnnnnnnnnnnnnnnnnnnnnnnnnnnnnnnnnnnnnnnnnnnnnnnnnnnnnnnnnnnnnnnnnnnnnnnnnnnnnnnnnnnnnnnnnnnnnnnnnnnnnnnnnnnnnnnnnnnnnnnnnnnnnnnnnnnnnnnnnnnnnnnnnnnnnnnnnnnnnnnnnnnnnnnnnnnnnnnnnnnnnnnnnnnnnnnnnnnnnnnnnnnnnnnnnnnnnnnnnnnnnnnnnnnnnnnnnnnnnnnnnnnnnnnnnnnnnnnnnnnnnnnnnnnnnnnnnnnnnnnnnnnnnnnnnnnnnnnnnnnnnnnnnnnnnnnnnnnnnnnnnnnnnnnnnnnnnnnnnnnnnnnnnnnnnnnnnnnnnnnnnnnnnnnnnnnnnnnnnnnnnnnnnnnnnnnnnnnnnnnnnnnnnnnnnnnnnnnnnnnnnnnnnnnnnnnnnnnnnnnnnnnnnnnnnnnnnnnnnnnnnnnnnnnnnnnnnnnnnnnnnnnnnnnnnnnnnnnnnnnnnnnnnnnnnnnnnnnnnnnnnnnnnnnnnnnnnnnnnnnnnnnnnnnnnnnnnnnnnnnnnnnnnnnnnnnnnnnnnnnnnnnnnnnnnnnnnnnnnnnnnnnnnnnnnnnnnnnnnnnnnnnnnnnnnnnnnnnnnnnnnnnnnnnnnnnnnnnnnnnnnnnnnnnnnnnnnnnnnnnnnnnnnnnnnnnnnnnnnnnnnnnnnnnnnnnnnnnnnnnnnnnnnnnnnnnnnnnnnnnnnnnnnnnnnnnnnnnnnnnnnnnnnnnnnnnnnnnnnnnnnnnnnnnnnnnnnnnnnnnnnnnnnnnnnnnnnnnnnnnnnnnnnnnnnnnnnnnnnnnnnnnnnnnnnnnnnnnnnnnnnnnnnnnnnnnnnnnnnnnnnnnnnnnnnnnnnnnnnnnnnnnnnnnnnnnnnnnnnnnnnnnnnnnnnnnnnnnnnnnnnnnnnnnnnnnnnnnnnnnnnnnnnnnnnnnnnnnnnnnnnnnnnnnnnnnnnnnnnnnnnnnnnnnnnnnnnnnnnnnnnnnnnnnnnnnnnnnnnnnnnnnnnnnnnnnnnnnnnnnnnnnnnnnnnnnnnnnnnnnnnnnnnnnnnnnnnnnnnnnnnnnnnnnnnnnnnnnnnnnnnnnnnnnnnnnnnnnnnnnnnnnnnnnnnnnnnnnnnnnnnnnnnnnnnnnnnnnnnnnnnnnnnnnnnnnnnnnnnnnnnnnnnnnnnnnnnnnnnnnnnnnnnnnnnnnnnnnnnnnnnnnnnnnnnnnnnnnnnnnnnnnnnnnnnnnnnnnnnnnnnnnnnnnnnnnnnnnnnnnnnnnnnnnnnnnnnnnnnnnnnnnnnnnnnnnnnnnnnnnnnnnnnnnnnnnnnnnnnnnnnnnnnnnnnnnnnnnnnnnnnnnnnnnnnnnnnnnnaagccacatagaggatgcctacaaggcttccatttctaatgggtgtaaaaaagttggtcacattacctaggcaaataaaatatgaaagcatttgacatgaccagaaacttaaagtgtcaaaattagtgagcaatgaatgctacagccacacataattcatgacttgctgcatttttcctatgctgtgcatatttaaatatacatagcagttattctccagcaatgtgctggattttcgatgccatggtcctaacactggcaatttagagaaatttgggggaatgtggcaattttgatatctgttgtaactgaatctcttgataggttggcatgcttagttgagtaatcgatgccaaaagagatgtggaactcatacactcactaagaaaagtgcagatcattccacctgcgaggaggctctcggagctttttaattccattgtaaatgtgacacccactgggaactaaaagaccaaggatgctaatacagtcttaagatttattccttgccttgacattcactatactgaaggaccttcaagcagccacactacttgtgatcatgcactagacatccttatttttaaaattgaaataaacaggcagtcagccccgaaaacacatacagacaagcagcagtgtgcagagtgaacaggttgtatttatgtgtttaggaacatcgacagtaaatgggaaaagaggcaatgggtttgaaagagagcaaggaaaggacacatggaggaaagggcggggagagtgggaaggggagggagaaatgatgtaactataatctcaaagctaaataatttttaaagcatgaaatagtacccacaaggacaggattcctacggagataggtttgactgtagactatggaaggagaggcgtggttctcttgaggccaggggtcaagatcactgtgtctttctgccacagaccatgatgaatgtacaacgaccaacatgtgcttgaatggaatgtgtatcaacgaagatggcagcttcaagtgcgtgtgcaagccaggcttcgtcctggctccaaacggccgctactgcacaggtatgtatagctttgaggtaagaaagccaccatgactcacacagggcccttggctcatgcacaagtatactcagtatctcagtttgatgctactcattatctcttgctagtttagtaaggcagatgtctaaagtttcctaaggaaatatatattgttgagaaataactgtgtctttgcaaagtaataatggtatatgaaaaaaattaaaggaatggcagattgatttaattaagtctgaaggagacaatacagaaacaatgtcttcctgcttgttggctaaatgagcaagagtaatcaaatgcccttgcaaacttttcatttttgtatttctccaggatcggatttttctaaggtcatttttatgggcacagtatctcatatattccatagagctgatctgcagattctttgggaacatatcatcaatctaatttcatcttaatttcattaagtggagacataatttgagtgttttcattagctattttgtttatgaagcaattttggagaccaaataatttcaataaatagaacccccctggaaatactgtatgatgttcatactcacaagcggagctttgtaacatggaacatgttttgtggtttttgtcttggaagcaagcttttatttttatttcagtttcctccctcagaggaaatcaactttctgcctccagtttcaccagtctacctgaataaattaagattccttaccaagtcctatgacttcattaacatcccaggggcagtcgggatacaaagtggtacaagtttatatatagcagatagcttttgactttgcaaagaagggaactataaagtggactgggagagctacagctttggactcaaggtcagttgactgagatttagcacaggataggtgaccaccattgtactgcacaccagtttggaacttcacttgagagtttcttgggaaagttgaatgcccgtatcagatgcctggcttaacccttcctccctcctggggtttattcttcatcagctttcttactacaaatgttagaatccgtgggtcttgacttagcacttctgtatctgaggtgtgcctccgttgttgagaatctccttaatgttgggcagcttttgataaatacaagcagaatggaaattacaaggcaaatctcaacttttgttgttgttaatatgaaatgttcaaattgatgtcaaagcagaatctactcatgtgtgaagaaaattgtaaaacttggccacagatctgaagaggtttacttcacttcatttgaattagacaatattcacaaggttatcaaagagataatagaagtcgtgagactcttttttcccccctcaacgcatagagcagattttactcagcctttaccaaatgcgcttgctaggactgtattattgtagaggtcagtttgcatttgtgtgtaacactctacaagttactcagttaaaaggttgataggctagggcagttcagcaagcaaagtctgatactcagtaatggaccagcttctgcccccccccccccgggcagacgtggacgaatgccagaccccaggaatctgcatgaacgggcactgcatcaacaacgaaggatccttccgctgtgactgtcctcccggcctggctgtgggtgtggacggacgtgtatgtgttggtaagtgaggtcttcaataatggcccgatggtcccaagtgatctctgaaaacataaaatgggatatgtctacacaaaggaatagtatttgaccacaaacagaaggcatgcaaagacacgggtaagacttctctctcatgccaagtgagaggtgtcagtcacaaaaaggtgacattatattgtgttggatgttgttcagaggaaatggccagagaggccaagctgcatgcatttaatatgattgctgagcgcaagaggaggaaatgttagctaaataaagaacatgcaaatgttcctaaaacccactgtgagtgtaaacactcttaaaatgtagagttcccatgggtaaattttatggcgtataagttatatctcaataaaactgttttataacaccgaaaccctaaacttactcttttcaaagcttctgatggtatacaaagaaatggagttctgtgttcagtgggtgtttgtgttgttattaaccacggcatatgtaattgggggttacagttacatgcgtgtaaactctttttctcaaataaagcctgaagcatgaggaactcattctgtagaagtgtactaatatctaaagcttaaagtattcaagagtattcctcaccaccacgaagggagactatgagaccaaatgcacattttactctaagccactctgaactccctttggaaacacctgctgaatggatggcatgaaaatgaatctaaagggccatgagttggcgttgaaaaagcgtgtggagctttgaggggctgtgggcactccaagacctaagcagtaatgcttcggtgatgacagagagaagttaggaagatatgttaacagggtttccccttctaagcgcttctgtgagacttcagggatgggttggtccttttcatgccctctggatttcagcttatgcaggaagacagcaaggctggtttgaaggcacatttgagaaaaaggaaattcttagccatcacatttaaatactttacgtgtaactctcgaattccaggaggggtaaggagggacaaggaagggtgggcagatggaaatcatctgttctctcaaattcatcctccgcccagctgaggctccatcccagcctgcaggttgtcagcgctttgtccaggggaatttcaaacagaggccctagaagaatgtagctccttcctgtgtggaaagcccaagaagaatttttcagttgccttaaactatctagttgcttttcatctacacctaaatgattccgttgaaatcgaaagtgaacataaagctggtttaggatggagaaattattatttttttccttccaagcagccagtttatgagcatttatcacaaaactgatgttcaaaaccaagacttgattcttttctccacatgcctggaacacatcagaaacctttggaatgcttttgtgaacttttttgtccttgtggcaatttcaacattttaacatagagcatcatttttccgtgtggaaagttatatattgctattctgatactaagggagatttcatcagtcctcccaataaacagcgagaactgtcccttgttaccttaggaagaagtcaggcctatgtcttgttggaattggctctttaacagaggtttctttaattatatctttcttcctaaaagaattgagatttaaaaaaaacactttcataaaattaagcgatggttttagcatactgaagagccatggctcacagtgtaaacaggagacaaaacgaatgtttccctaccatccccacccctttacactattttgtagttgtttcaggagacagagaagatcccataatgaaagaagaaaagtcaggttatcccctaacttagcatttaggtaacaaaaaattccatgaagattttatttaatgggagagatccaaatcttgacattagaatgttcactagcacatgataattaacattcctgggttttaaataataaacacccttccaagctcagctcttcagtgagtgatggtgaaggcagggatgctttgtgttattagagtcaccctaggatggctttgcaaatatttaaagtcaccttgtgcgcctgccacatggagccctttcttcatgtgacccagtccatagacatatcatcctctgccctctgtcttccttacccacatccactgtgacccgaggctacctccttccaccatctgttcattgctgacacagtgggtaccatagcactggacctgactcttaaactgaataaaaagcccttccagggatcccatgggactcttttagtcttgataagatttaagtaaaaagaacttcaatttataacccagattatgcacttaacctttttaaataaacattcttttaagagtcagctacctagattatagatagataagtagatagatagatagatagatagatagatagatagatagatagatgatagatagatagatagatagatagatagatagatagacagatagacagatagacagatagataaacagatgacagatagatagacagaaaggcagacagatccttgactttgggcagatatgagagatctgcattaaattctctatattcaggatgggatctcaaatttatcttacctattgaaaaatttttagttaaatttcattttcagcaggttccttgaaacactagctttagaacattttatcatgttcccaagtcctaatatatttctttatagaaagttcacgttcacctcattactggttttgttgtttactatctatgtgctattggacaaggtatagaccctccaaaaaaaaaaaaaagcaacaacaacaacaaaaacaaaaagaacaaaaaaacccctccttccctcagtagctctgttgattaaatatgttattgctacatacttcacctatgtaaagcattgtacagtgtcagctcagagcaaacagataataagaaaacaatactggagagatgacccagtgatcaatagtacatagaactcttacagaagacccaactttgatttctagcaaaatcaaaggagattgtggtttttgtcaagtcacaatctcctgtgactccagacccaaggtatctgatatcttcctctggcttcatgggcacctgaacttatgtgtgtacgtgcacatgcaaattaaaaataaaaaatcttatttaaaagaaaaatagtactttttatttggataaaataatggtgtcatatctagtgtgagtcttaagagttgctgttttatgtagtgaagttgacaataacaagcaagtaatacaaaattagtattctgcatccatatgtattttgctactggcttctagaatttgctaatatactggttaaaaaaattctcaaaataatctcattttaaagaaaagataacatgctgaaatgcaatattatatgtaaaagatatgtatacctttagtgtatattaaagtatatatgtatacatatatcatgttaaatgcatatattactctggtccacacagtttccaccccagtcttgtgagtgcattctcgtagctcactgctggtattcgtctttcctattgtgactcggttacatgattagggaaatatgaactgaagttctatcttggggtccttgatcataatactgtccttgccaaagatcaaagaaatagggttgctaccccttagggctttgattttctgagtgatatttggtacctcacttaatgtttaactagcattcctgtttactttataaactacttcactgataagcaaagtgtgtagtaatctgagatagaccatctaatggagatctgaattcaggattggtgtggtcctaggcccacacaagaattatgctgctttctttcttggggaccttcttgtgtcaacggctttcagtaacttagtcaaccacacaaacttgtgtgtaatgcttttgttcctgtagtagattccacagctttttgcctacttgcttttattctttcattttatattttgactggtttagatttgtttgctcattatttttaccttcatatgtgtgagcctgggtgagcttatgtgtaccatgcatgttcaggagctctctaaaacaggtgaaggtgccagatcccctggaattgaagttaatttttcatgagggttgtggaaactggactggggtcctccacaaaagctgtaagttccattagatactgaatcatgtccccagcccagtcaacttgcttttgaaaagctgtacactgtatgttcttgttctgaaagcagcagtaacattgactacactaatccctccccaagcgctcacagaaatcctactttaagtcaaaactgtgtttctctggattagaatgataaactcgggaccctcttgtatgtggctatatgaacatctcagaagttaatggagctgtgaatctaatacatttcatggataaaaactacttgagcataagaaagcattagaaaccgggcagtggtggcacatgcctttaatcccagcaattgggaggcagaggcaggttctgagttcaaggccagcctggtctacagagtgagttccaggacagccagggtacacagagaaaccctgtctggaaaaaaaaacaaaagaaagaaagaaagaaagagagatagagagagaaagaaagaaagaaagaaagaaagaaagaaagaaagaaagaaaagaaagagaaagagagaaagaaaggaagaaagaaagaaggaaggaaagaaagaaagaaagaaagaaagaaagaaagaaagaaagaaagaaagaaagaaagaaagaaagaaagaaaggaaggaaggaaggaaggaaggaaggaaggaagaaagcaagcaagcattagaagacacatgctaagaaacagatacttgtttctaacaacttatcaacaatgtaacaatgttagggacttacaatggggactatctctgatgaaattgaccatgttctcctgcttagaaactttgctgactctctggcctttaagatgttcagaatttaaaaaaaaatagttcattgttgactccctcgtaaaactgtaacatatttcataagactagagagtgagggagtgaactactgcaggatttttaggggtgtggattggcataaagggagaagaggcaccttaggagtcactcaaacctaccgtgaatccaaacttgggtctttgagagtttgtaactttgattttttacctattcttcttcagcttgagtgacctctttcatgaggccatgtctgcatagccccttagtacagtgccagagagagagaggttgttttctttttcttatgtttgtttgtatcttaaatggctgttttggtttggtttggttttctacaacaaaacaccatgatcaaaacagcaaattgtggaagaaaggtttttttttttttttttttttttcagcttacacttctaagttgctgttcatcaacaaaagaaagtcaggacaggaactcaaacagagcagaaacctggtggcaagagctgatgcagaggccacagaggggtgctgcctactggattgctccccctggtttgctcatctcagggctaccagctcagggatggcaccacccacaatgggctggcctatgctccattgatcactaattgagaaaatgtgttatggctggatttcatggaggcatttcctcaactaacactcttcctctctgatgactctagcttgtgttcagttggcaaaaatttacccagtgcagtctttgtataaagacaggttgtcactatgtagctggcccagaactctgtggaccaagtgagccttgaacacacagagatcttcctgtctctgcctcctgagtgctgggattaagggcatgtgccaccgtgcccagctgctcattttctaaagtgtaattcttaattgagttgggatatgggaggagattaaaaacatagtcaccagcatcgtcctggggttgaaaagaaagacttcctaatttaagaagtcaaagcaaataatctcctaggcacctctcagttgcttcaaggcagtttatctgcatcgctccttagaagttctcaaatagaaacaagagtgcagtgccaggcgtggccaggacacggtgaggttaaagctcaaagtagtgatgtttgactgttgctatatcctcagccaatgaaacatctgtgagaatagtggggtaatggacacgtgtgtggcacagagaacttcggatgggtagggctggggaccatagtcgttggtacgttttcaattgtccccttacactacaaacatttgttcatttcctaaccttgaagatgctaaagatgcaaatggcagatgttccctgggcattcccaaggcagtaacctcttaggttaaagaagccttccatttcagtccctgatggtaagtccctttatctccactagacactcatatgcgtagcacctgctacggggaaatcaagaaaggagtgtgtgtgcgtccattcccgggtgcggtgaccaagtctgaatgctgctgtgctaatccagactatggttttggagaaccttgccagccttgccccgctaaaaattcaggtaactgcacatcgtaagaaactagaaactcaacagtaggattgggccaaagattatgtctactacaaaatgatttgtcttctgaattgaagaagaaagagccgggtttacattatcatataagggaggtagtcaaacgtgaacaagatctatttgctgttgtgatggtggcccagattttatacatgactgctaccctggcagtataaataggttgacatcgtacttgccagtattgagcttacaaatacaaaacaatctgattgggtcctttaaactctagacaccttatgatgtcaagcctcaggtccatcaaggttgactcttgttcattgataattgcgatgagcctctttcaaatacaaataagttcagtggggttcaaaaataaacaaactccctgccttttctctaactattcgctgatttcaaattcttgagatgatattctcaggaaagcactgatttttatcattgttaaaatgaatgtacataaaattgttattttaatgactgagttatggaatgggcttagcataacgtctttgtttttactgttatattaatggctgagtgcagagtattgtctaacttttctgtctctattgttatgctaatgagtgggtgtggcgtgggtgtggcttaacatttcctgtttgtttttgatcacacagctgagttccatggcctctgtagcagtggcatcggcatcactgtggatggaagaggtgattctgttcaacttgtgattattaaaatataacggtatagcttgctgattgtcagatgaatgtggttatatttactgtgaaaattcacaagtggataaatggttgttaagttagatggtgttaagtggtgttttccatgtgactgcttttcaatacagacaaatatttattggttaaaagtgcttccttgagaatgttactaacaatccataggcatgattttatgtgcaaattttctaagacggtgctatatcatgtgattatacagacacagttagaaaagtatccatctgtagggatatttgatatggatcaagtcttagacatactatcccaaaattaaattgtttgtgttttggaaacaccaagatgtttctgtcagactgtagaagtaaaattcatttaagttttcttattgcaaacagcgtcatgctgtaagaaacctctgatgggcaagggcatctgtgttgactagaggagaatgtttgatgtgatgttacgttttaaatgagtatctgaaaccaaagagggaggcagaattttgctgggatattttttttcctcagatgcaaaatgaaaagctagataatcagagagtttctaaggacgccttcccaattgctttttcccttttttaagacagagtctcaaagcccaggctggctctgaactcctgattctcctgccctgttcccaggtgctggggttatacaaatgttctatggctaaccaatttttgtaaattctaattcctataaacaatcattatcagaattctgatcacagtaaacaaaattggatttttgtatcacatttttgtcattgannnnnnnnnnnnnnnnnnnnnnnnnnnnnnnnnnnnnnnnnnnnnnnnnnnnnnnnnnnnnnnnnnnnnnnnnnnnnnnnnnnnnnnnnnnnnnnnnnnnnnnnnnnnnnnnnnnnnnnnnnnnnnnnnnnnnnnnnnnnnnnnnnnnnnnnnnnnnnnnnnnnnnnnnnnnnnnnnnnnnnnnnnnnnnnnnnnnnnnnnnnnnnnnnnnnnnnnnnnnnnnnnnnnnnnnnnnnnnnnnnnnnnnnnnnnnnnnnnnnnnnnnnnnnnnnnnnnnnnnnnnnnnnnnnnnnnnnnnnnnnnnnnnnnnnnnnnnnnnnnnnnnnnnnnnnnnnnnnnnnnnnnnnnnnnnnnnnnnnaggagtgagaggaggaagaggattccctgtcaatggcccccgactagagcctattgcctgtttggaaccgtacgtttgtttcacttggattcacaagtgacattgtccctgggagacatggcagtcatgtgcccattgtttgctgtaaatcactggattgtcagcagccatgttttatcatcttctgaatccattctaactcatcaacaatgagaaacactgcgtatcccatgacttagggaattgctaaatatgagaacaaagcaggaacgtcctgtgaccataaaatcatacaggccttcctcataaatttctatgttttaattagatggctgtgatacttattaaattgagttttcccttggattttgagccaacggcctgtaaattttctttattaattttgtcaaaaatatagacatactgcatgacttaattatttggttgctgccaacacctttctttttctctgacttaccagtggagtgtcttgtatccttccattttatttttctttcttttttttttctaaaaggcatattgcagttttcaaagttagatatttcacatgttggaagttccttattagatccctttttatcaacaaacaggtgtctgtgagtgttgaccatgctatattccacacagatattaacgagtgtgccttggaccctgacatatgtgccaatgggatctgtgaaaacctgcgaggcagctaccgctgtaactgcaacagtggctatgaaccagatgcctcaggaagaaattgcattggtaagttactggaggtttatacacaagggccatccatgtcgtctaaccccatggataagagaagaaacaacaattaatgagagcaacttagctcccctcattacctttgcaccatacattgatacagaagcattcgaactgagttttgcagcacagtatcaaactcaatggagtgctattatttaagataagttttacccaaatgagtgaatcatttgcccactgcttctctgtacttattttaatcctacatgtttccactgagacatggacttcaaaaactaacactcttggtaatagtaaagttggggaagggggatgctccaggttagaggaacttcagctttatccagaaaccactaattgccaccaggtgcctaaatatggcagcaaaagtaagtgtatccctttttcaacttataaaagaagataaaaaacaaaacaaaacttctgtgtgatctgcttcgagcagaaggaaagagggaaagattaacacttacagtgctttattggtttatagatttaagagactggaaagaaacaaaattgtcccacaggaaaattgactctattttcacaaaatgagaattattacatcattatatgtaatacttacaaataatttgtaatgctttaaaagccatcaattgatggctgtggataaagaaacttactattctatgtttctgctgctggctttattacccaatctatgcatttgaccttgagtttaagatatatacagatagacttctattactctctgactattgcatatttaaataggttgaacatcagtaggaaagggtaccagccaaagattctcaaacagttctaaaagcatgcaaacatgctagaggaccttgtcgagcactcaggttcaatccctggcaccacagaaaccaaagtgtggtgacacacacctataatccagaccttgagaggcagaaggctcaggaattcagtctcacggctatcgtagtcccaggccagcccgggctggaaatcctgtctcaataaataaataaatatgagctaaaccatcttttattcagcagaagccaaggcacttccagcttagcttctaagttcaggtgagtgtgtgagtgggacccttttaaagccaggggagtcctgtgaacattcccgctccaagcacaggtgacatgtctgtaacactttacactgtgtggtttttgttaaaatgtatacatgatgaagggcctggagagatgtctcagcaattcagagcactggctgctcttccagaggaccagagttcagttcccagcatgtacatggtggttgacatgtgatgccctctgctgacctccctagggactgtacacacgtgccacacattcatgcaggcaggcaaagcacccatacacataaaataaaaatatgtgagccttatcaaatggttgactcatccttttcttacccatttctcaaggaattggactgtacccctcgctaagcatgtgccagagtcctaaagcacaggatgtgacctcattttgggatcacttttatcttttaatatttatttaattttttgagaatttcagatgtgcatactgtggatgttgatcataaccacatcttctgccccttccccagcctcttccacactcaccccttactctctccctccttccaacttcctgccttcctgaaaaatgaatcaacaaataaatggttgagtccactttgtgcttcacatatatgcacgggtgtgtgatcatccgctagagcatggttgactcactgacctactagaggctatacccctcgtagaaaactgactgggtttgtacaattctaatttcaaagtacatattaaaatatctaataaaaattgaattgaaaaaaaaaagtcagactcggagcaaaacggaaaagtggagaaaactcaagcaaaacagaaaggtaattctgcctacagtaacaacatttgaaatcattttctgatctccattttcagtattatcagggtgactctgtatcatttgacaaagtgcaattgttcgcgagagtaaaattagcaaaacgaactctttatcccccaagtagagttactgtttcttccacttggtaattatacttgctgataagaaggcaatgtaacacatgcctgtaatctctgcacactagaagtgaattcaatgccaacctgagagacatagtgaggtctgtttccagtaaaacaaagccaaaaaagaaaagaaggaaggaaggagggagggagggaggcagggagggagggagggagggagggaaggaagagaaggaagaagaaggaaggaaggaaggaaggaaggaaggaatagtgagcaactaaagaagtaatgagcccttgctaagtcctgtgcattttgcaaagtcttgagaagatttttttaaagtattcaccagcataagaacatagcatttgaatagcacgtggtgtgtttgctctagtgtggtctaaagatactgaggcagagaggagagagggagccagggaccaaacaaagaaaagggaagcagaagtggtctgtgcattacgcctttaaccatttccatctcctgtcttccactggctgcttgcagacattgatgaatgcctggttaataggctgctttgtgacaacggcctatgcagaaatacccctggcagttacagctgcacgtgtccccctggctatgtgttccggacggagacagagacctgcgaaggtaaggacagtgttccttgactccggcatgcccttacccaggaagcaccaacatcagtcatagtgaatgagtatgctctaaggacatgtgtgaatgaatgtcttccctattttatgatctctgttcactgctttggaagttcaggaaatggcattcatataaacacagtttataaacaaatgtcagttcgttctgttcacatagtctctcaacaagcacttagaaaaaccaacagatagagccatattgtttgactcgttaaaataaaatatctgattttgttcatttggttcaccctggaaataaaaatcgctgtgacaccttaacctacaaaccttcattccaaaaagactcagttgttagccactttattatgaaatagatggttaacagtgtcaaaatcctgacccggaaaaatatttggagcctatgtgaaactaattccatgatgaaatagatagtctataaaaagtatcatttctgtttgacaagttaaaggatgttatttggatttgttcaatattttaagacttattttatgccatgagtttctatacagtgcaagttgcttgagccagttaacggcttaaggaaatctctggtttcagtgagattcagcttaggacatgagtgcatgaagctatgacatcagtgcataaggctgtgatatcagtgcatgaggctatgacatcatgatttggtatcttgatcacatggtatttcagaataatctgtttcttaactaccattcactctcctcctgtagtttctttacattctgtgggcctgcagggggctcctataatatgctcaaactcagttgctacttccagatacttcgatccttcttagaagggggtataaaacacccatggaaggagttacagagacaaagtgtggaacagagactgaaggaaaggccatccagagactgccccacctggggattcatcccatgtacaatcgcaaaacccagacacaattgtgaatgccaacaagtgcttgctgagaggagcctgatatagctgtctcctgagagagtctgccagtgcctggcaaatacagaagtggatgctcacagccatccattgtatggagcacagggtccccaatgaaggagcgagagaaaggacccaaggagctgaaagggtttgcagctccatagaaggaacaacagtatgaactagctagtatctccagagctccctgggattaaaccaccaaccaaagagtacaaatggtgagactcatggctccagctgcatatgtagcagatgatggcctaatcagtcatcaatgagaggaaagtccttggtcctgtgaaggctctatgccccagtgtaggggaatgccagggccaggaagtgggagtgggtaggttggtgacaaggaagggaggggtatgtggaggggggctttggaggggaaaccaggaaaggggatagcatttgaaatgtaaataaagaaaatatccaataaagaaaaagaaagggaaaaaaaaagaaagttcatattaattattgcagaatacccttcccttttctgtgggtgtacttgttgctcggtgactccacagtcgggaaaagtacaatagcgttaggatgaaaagaagaaggaggaggaggaggaggaggagggnnnnnnnnnnnnnnnnnnnnggttgcatcagcttcatctttaacttcaaagcattcttgtggacacaaacaagttgtattgaacaagatgctgcaacacagaagtctcagctgacgtcaatagaatgcaattacagagcacagttctaagtttgggttgagctgtgtgtgtggagaggaacctttgaaaaacagtaattcaccaaaaggtgtgggggtatgtgtgtggaggaagatagtcatttacgtaaaatcacattttcctaaacttaactgaggtaactgtttacccatggatcctgggtactgagtccatggcccctctctaccagatgctcacagggttccctaagagtgagggcatctgtcagtaaagccagcgcaggctcctcagctatgcatgtgacagttgctatctctggtctctggtctcactcctaacacccattacccttcaacattgctctgaggaaagtttgtctagtcagatttccctgtattgtccctgtccccccacacctaccccacagagggatgtggtaagggattgctggaggtttttggtttgtttgtttcggttttcctgggtattcacactttctgctgcctttagccattgtaccaattcagttctctattaaagggtaggttcgtctaaatctcgggaaacttaaaaagcaagagcagatgagatatcatctcatttagctcagtactgtccattatttggtccgttttcccattctgttgaaaccatacattctggtaatcacttgaggataaagtggaaaccgggtggttggggtctggttccgtgatatatatgcggaattgtcaaagcaggttagatggagtccaaggtactgagaggtggactaccaaacagggacacgacagaatgacatttagtcgtgaaatcttgggtggccacataaatttgaaggaacttccatagcaaatcagccaacaaggaaggttagagagacatcttgacttattttgttcaaaggacacttgctcttaacaaaccatctgtgccattcatgggaaagaagtttgtgttgtataaataaagatgaaataatagagaaatattttggccccaaccttatggtgttggtggacataaaacaaaacaaaacaaaaaaaacagatttacacagaaaacttgctccccccaaattttacattctgttattcgaatttcatcaaaagatttctcctaaatactatgtacgtacaaacccacaagctgttcagctcttctccccttgtgtctcctgacgtcccccattagccacagtcaattttgtcagcctgagttctctctctactctttcttcattaatttccaagggctagacagagaattattaccagcatcaatgcaaactttgacttcctgtatttatattttctctgttcgcttattctatttgtaatttgtgttttcgatggattaatttaaatatatataataaacaacagtaacaataagcaggatgttcctctgtgttttaggctgaagttaccaaaaaaaaattatttcatttttcctgagcttggagagtctgtgaaagttaaattttttacatcaatcgctgtggtttcgattgtgtttccagtgacataactagttaaatgtaaaccagatgtgctttgaagtttatttccagaaatgtacagtgaactgtttcaatttctggttccatgacatttataccataaaaaaatatatatttaagggaaaaactgaatagctgatatttgtacttgtccctgtatgtgttttcagtctttgagttcaccattgcttaattcaaaatgaatcttttaaaactatgacacaggcacttgtcttttggggaaatcttcttacacatgaattcattggagaattaaatggggaatcccctcagacagattgcctgttcccggcacatctagtttctttggctcttgccgaatattcatggaaggatttcaatgttgtagagcatttgcttcattaaaaaggcttacatctgaattagtgtattattaggaagacttttatttctcttataagagtctttttctactgcaagcactctgaaagccaaatgtaattgtatccctgcaccccgataatttatagttcaagaactaaattaacacctgagcacctctttagtcattctgaagtagcaataatctttctctatatagtttttttttaattaaaatacaactatataattctcaccttctctctcttctccctctaacaccttccatgtacttgtttctcaagctcatggcctctgtttcattgttgttgttgttgttgttgttttgtgtgtgtttgtgtgtgtgtgtttctaaatataaaaatataaccttctcagtccatatgttacttgtacatatatgtttttaaggctgaccacttggtgtcagataatcaatcagagattcttcctgactctcagagttccttacatgcctgtagttctttgtttacagttaggctcccatgacatttccctctcccatattactgcgtctttggtccttttacataggtttctgaattgctattttaaacctattagctggcagtcagttctgagcctgccccccctttcaggaccggtttatttacattttatttgagatagtcaggggcaagaattagagccttccggctttacttatatgtctttgtttcggtatttaaagaagagaagggtctatattaaatctaaagctatgtatggagggcagtgtctccttggaatctcagaaattctactgtttagctaagagtgttgaggcatgttgacatgtttggaatcacttagctagtagggatgggatctcaatgatgactcttggaagctgagtagttgagtttgtataggaagtgtccttaacgttattcatattttaaccgagagttgtgtttgcctcttagtgagtcatgtgttaagtgactttagaaccttgagaaagtcacctcttaaaaaaatgtaggctgatttctgaattcgaggccagcctggtctacaaagtgagttccaggacagccagggctatacagagaaaccctgtcttgaaaaacaaaaacaaaaaacaaaaaacaaaaacaaaaacaaaacaaaacaaaaaaacaggtgtactgtgattctttttacttttgtcaccaacaggatttgcttactggtatattgtttgatttnnnnnnnnnnnnnnnnnnnntgcttactggtatattgtttgatttaaggctaaaagccggtagtcatcaagtcctaattgagtgcaattaattcttcttcttttttctttttttggtctttggtttttccgagacagggtttctctgtgtagccctggctgtcctggaactcactttgtaaaccaggctggcctcgaactcagaaatctgcctgcctctgcctcccaagtgctgggattaaaggcgtgagccaccactgcccagcatttttttctatttctaatggttctgaagattgaatttagagcctgaggcatatgctctacctctgagccatgcccctgcctgagccatgcccctgcctggagccatgcccctgcctgagccatgcccctgcctgagccacgccccctcctgagccacgccccctgccactctgccccagcactcgttttcctatatcgtatctgaccaaacttgtggtgtaaagtaattctttaactaatcacataattaataaagggctcaagaaagagaataatgaatgacagctggggagagttctgtagcctggattgatatcccggttcttatttcttggtatgcctctaagagttcagaatgaaagccaatgttggtatacgtttgtcttcaaagcttcgcagaagcgtaagtgacagaaatatccaacccttgttgtgccccagagtcgtacctggagttagaacaaactacagagcaaaacaaatcgactatatacagttagagtcatagaagacacacatactgaatcatcttccgaatagactgttgctaatacggtcctcctgagtctccagtcatgtcgagggctatctgtgctgtagaacacatgtctgccttccctattcactttaggccctgtatatccatattaaaattataagagccaagtttaccagacgttctggcacagtctggcttgcctggaataatattttccagaaacacatggcagctctaatggaatttttttccttctggattgtagatgtaaatgaatgtgagagcaacccgtgtgtcaatggagcctgcaggaacaacctgggctctttccattgcgagtgctcgcccggcagcaagctcagctccaccggactcatttgcatcggtaagatccccgcacggatctccctgtgaccgtctctcatgctcttgcctcagcctgaggtgcaaacagagctgacggggaggagagcagaagagcagaagctgggcaggctttaaccagttaggctctagagcatcttcctttcgtgtctgtagatgcatgcacgctgccacgactgtgagcatttctgtgtgtacacttttcttacgtctgaatcccttaggcatgcgcacagtcaaatcccatcacagaaactttaaatctgtcgtgatgaaaggcatggtggggtttggattcagttcacaggacaagagtttgaagatttttttaggcactgaagcatagaaggagttcagtattctcctttccctcgccggtcgcaagttggtagactccagagaaagaaagataagtgctctcttactttggaaaatctctaggtgtgataatattttgctccaagatgggattttgacatatagcccaggctggcctaggatctgatggagagcaggctgaccaagaattccatgtaattcctctgtctcagcttcacaagtcctgggatgacgggtatgggccatcatgcctgctcaagtccaggtcttggtagtgacatataatgtatgcagggtaagataatttgatcaaagatgtataccgacaaggtctacccaagtcatttctttctatgtctagtggcagtggctctatttaccaggcatgcccagactcccatcctgcctagaatccacctttaaaggaaactaattcttctgatgatacttggcttcacatcgcaccatataaatgggcaagttcttgcttactatctaagcaagtgaattcatctctgcttgttgtcctttagagttactaatgaaacaatgatgtttattgagtcattttttttcacttgccaacaactgaatgctaccacattacccacacagaaactttaagtattttcattcattatgataaaattttgagtatttccgttggttctctttccatcatgtgaatctcagtcaggtcaccaggcttgtgggcaagcacgtttgtccaccgagccatctctccagccagccttgaacacgttcttagtggggctgttggtggttctgaccagtgatgagcctgccgctgctagtcacaggatctgagtcactaaatttgtaaaggaaagaaaattctactttgtggttactaattaaaagtcggatcatctgtgacttcactagggtactaaggctggctgcagagtttgagttagtcctacggatatactaaatgtgattttgtgaatgctaaggagactactgtatcctgggtagtgttgttcagctttctaggacagtgcagtaagttcatcctacagagttgtgttgctctcctgggttagcacccatatcccatgggcctgcactcttgccccatgtccttgacttctgcggacagaaggaacagcagcttccctgataacaggtcccactgtttatccctcgtggtagattataaagtcagccactcactttctcaggatcagcattgtaaacatcccaactgcaaccattttctggctcctttttccccctaatgtcttttgctctgttcttctcctgacccccagcctgcagtgtaccaccagtcagcccttgatctttttgcactcatgcctagttgctctctgcactgcttctcagttccattggatccatcctcacctttctattaatcccgggcttgtgtctccgcccggctgcagccgtttctatgtggatgtctctggacatctcagcagaagatgcctaacaccacccgattctgagtttcatacttgatcctgtttcctagaaacatttttgtcttggcaaatggcagccccattcttttcattgccaccccaaattctcctcttcaaccttaatggcttactcccaaacctcacattgaatacccacgacccagttttcaaccactctttacccccactcattatttgtcttctatttttaataattcatttaggttagcttagcacagcaatatatttcatcacagcatcttcatatgcatatatcattatattgtattcttatgcatccccctgtctctctgacctcccttgctagaccccatcaccttccctacacaaaccggttccttctctccccccagtcggccccccttcttatttcctgttatatatattccattactgtctttatttgcccctctctaaagatctatttctccccactcatgcttccctgtctagttgggatatacaaacatgtatgtataaatatacacacatacatatatacaggtgtatatttcaatctatgttgtgtatataatatttgtctttctgagtttgtttatttcatttaacctttccaattgggtttattttcctacaaaagtcacaaaatcccattatgtctatgtgcatactttctgtatgtttatctaattctgcctgccccctcacccagctcctcccatgtcctcattcccatgtcctcccacactctcagctcctcctacaccctcgtctccgcctatacccttagctcctcccatattctcactcagctcctcccacatcttcactcagctcctcccacacatacccagttcctcccacactctcatccagctcctcccacatcctcaccttctgcccacaccctcagcttatattttgatattcctaaggtgtgggcaacgatatgtgcttaagagtttattatcagaatcgtctgaggagaatgtcaagaatgcagatttctgacctgcacacctggacctatgaattaattaattaatcaaggatattgccagtctcatgcacacttggctgaactctgagttctccagagaaaactaggaatgtagctgtataggcagttagaatttgcatgtcagtcaatatttaacgtatgccatatttaaatacaagcacatgtcagtcttttcaaagaacatgctataaaaatgattttaagaatgaatactctggtgccttttcacactgttacatatctttagcatgcacaagagttcattgtctgccgagagaagaacttctcaacctctcctattcctttccagacagcctgaaaggaacctgctggctcaacatccaggacaaccgctgtgaggtgaacattaatggagccaccctgaaatccgaatgctgtgccacacttggagccgcttgggggagcccctgtgagcgctgtgagctaggtaggagcctgaccagaccctccgacttggccactggaaagtcctctttaaatcaacggtcactccttctcacagtgtgtcctaagtggtggggaaaacggctaggctgtcttctctccaaaactgtcttcccaggaaaattcattctcctcttgaaatgtatgtttaacagagagcagatcctctaagtatctcagatgtggagaggaaattggctcaaaccttatgtcctcatttgagtgtgtcccagtgggatgtgatagcctctcccctgaggttttgtctagctcgcttttaagtcagttgccaatttgaacagagatgaattgtaggagaaatcatttcaaactgtgtccacactgatagcgttaccatagcaactgaagtgctttctgaatcaaagacaattggtcctaggtctttgcgaccccactttaaatttaattccctcaccctgtttcttgagcctgagactcatgtactttttatatatgtatataaagaagtcaaatgctgtcctgctgttcttacagatgcagcttgcccaagagggtttgccaggatcaaaggtgtgacttgcgaaggtgggtgtgacgagtgaatggaatggactgctattttacttgcgagttgctagtcactgttctcaagacaaccttgagatttcaattttaaaaatcactccgtgtaattaacacgggtgcttaggaaatagctttgaggttcccacttctcttctttatacagttgaggaaatttcataaggaagtcccccagccttccaggcacagaacagctggcgagggagcacgtctgggctacacttttatggaccagcaagactgcggtcgtctgcacagctggtgcccaggaaagctggtggctgccttgtggaatattttttttttgcttaaactcaagtaataatccacactgtgttgcagattgaacacgccacacaggaaatgaggctacacctgctttttctatttgtgacatctttacctttctgcttactgcattctcccccctacagacgttaatgaatgcgaggtgtttcctggcgtctgtccaaatggacgctgtgtcaacagcaaaggctctttccactgtgaatgccctgaaggtcttactctggatggtaccggccgggtgtgtttgggtaagatgagttttcctgtctatatgccttgagctaaccatcagctcttttgtcctttggatggaagccagtccaaaaccagaaactattcttgaagaaatggctttaaatgagatactgtttgagggagaaaatatgtgttttatatatgtttaaatgtgtttaaatatatgtttaatatatgtttaaaatagtttaaaacattttcatgactaaaaaatatcatttaatccttagtttctgatactttagacaggttgagttattcatatgaagttaataggagaagaaaactaggcatagtttgaacctagtatttaaaacattatcatataccagcccactgcagctggactctccagacaaagggggaggggcaaaggtatgtcaatcatcctgctccctcctctgccaccattaaagggcagattttcttagtgcttttttttttttctaaagtcactatcaacaatgtatggatggtggtttggccttaggctttttcagggccgtagctgaaataatttaagtttcataaaatggaaaaaaaatgctctcctttatttcgcgttatatatgagcagaaagttctttttttaaagactacttttcccaataagctctggaatagtgaagttgtagtttgcaaaacattttttatgtcagcgttgttgtgtttggcacttaagaaggacagagaaggaatagtggtaatgccatattagacagtcttcaagtatttaaatgtatcaataatatttttccactactagtttagtagttaactccgcagtactacagagcttaatttactgtaacagagacttcattttaagttaatcttgacagcatatttaagtctggatagaaagcagtattgtggttcatatggaatcatttagaaagcacatattcaacatggaaatttttttttaatttggttgatttttcttcttgtggatgtgtgcatatctgagtgcttgcatagacattggtacacttaagagtcgatcacaagtcaactctttcttctcaggttctctccaacttcttcttgagacttgatctctcactgatgattctagagctttccatattggctagactaggagggcaatgaacaccccgccatcctttgtccccaccactccagagctggggtcataggtattcaccatcacacatggcttatactgagattgctggaaatctaagaacctcattcctgaacagcaaacctttgcctgactgacaacccaaatactgccttcttgagcctcttacttgatgaaagattttgttctttctaacttgttctaagttgacacctgctgaggatgtaagaacatttcagggggttggtgtgtggtagtgtgaagatgctaaggactggttagtgataagccgctgcattagagcttcatataaaataaggatgtcatctcaagcgtttgcaggaggtaagctgacataattgagtgaagcacaataggagcagaggggattgtggcaaactcccaagcccacatgccatcgggttcaaaggttctattataggttttgcaagccagtcaacgtgtctactttggttttgttgccctgtgccctggctatttcaattcttggtgtaaatactgatatgaatcttcacaataaagatacaaaattactcttctcaaatataaaggcttcttaaattcttggttcccataacccatggttccagtttatcacagaatgacttctgagcagattacttcagtggccctcgggccacctgtgtgtaattaaaatttagttattaaaaccttctcatctcaggaagagtcctccttccctagtggcagtgctgggtgaagccaacccagagatcagaactagggaagttgtgctaatgagactttgagatatggccaagtatgtggcttttgcttcctattaatgtagacagactacatgtaagactcaaaatgaaacattaccatgctccgtcttagttttgattcttggaaatgtgtgttacacaaggttagagacagttgtagaggttgctgcgacctttgattgagaatgtgaaatgttccacatggacaactgaggagcaaacttatctcctctttatagtgacccttctgtcaggatgctctaacctctgtgaagccgttttcaagcttcatgccatgcctcagaatattttcaccaaaatcattttatttagctatgaaaactctttttctgagcctgttattctttttttttcattagacagtgtgtgaccataggtcccccatctctgttgaccaacactagagcatattgtctgtagatcatactggctcaacctctttatggctgttcattgctgctctgggtctctaagtaactcaggctaagcactaacatacagtttggtacagattgaagttaggaggaaaatattcatttaaacaaatgatttggcccctttgtggtgacgaattcaacatgcctatatgactcaggaaaactcaaatgcaaaattcataacaatagaacaaaacccaattgaagtaaaaacatcttgttttagtaagttgcagatggggtgcagcaactattattgttcataattagaccctaacaagactgactagacactaacaatactaactagaccttaacagaactgattgggccctaacaggactgactaggccctaacatgactgactaggccttaacaggactgactaggccctaacaggactaactagactctaataagactgattaggccctaacaggactaactagacactaacagaactaactagaccctaacaggactaactagaccctaacaggactaactagaccctaacaagactgcaaaattactttaaagtcgtgacaaagaagaatccatcatcgaaattactgttctgatgtgaaaaatgtaagagtgagatcatgggccaggacatggaagagtcatgtcatcacgagagcttttcggggttctttgtgagatttaagtaatctcttaaagagcccaccttcactctccctacctgactgttaccatggagtccattcaaggtggtgacaaactgatctctcacttcaagtctgtctccagcccaccgtatcagtccacttcacccagcatggccactgagaaaggaagagtcctcggagatgtaacagtgttagctaagtacaggtagcctggagcccatagtttccgaggcactaagcagggataggatgctcagtgagtgctcccgctcagctcatgctcagactgcacgtgtgctctccatgcagatatccgtatggagcactgcttcctgaagtgggatgaggatgagtgcatccaccctgtccctgggaagttccgcatggacgcctgctgctgtgcagtcggggcagcttggggcacagagtgtgaagaatgtcctaagcctggcaccaaggaatatgagaccctgtgcccgcggggcccaggctttgctaacagaggggacatcctcactgggcgtccattttacaaaggtaagtgagtacaagctggtctccgacccgctgtagtcacagggcaccctctacgctctctgagcattggttaagttttcaacatatcattggtggccaacctaaggtccaaaactataaatgacatggacaaagtggtatggatacaggctgggaaatacaatggtgatcactctgtctctctgtctgtccttggacttttcttttgacatagcttgaggagaggcaactctgcctactgcctcagcagcagagagatctctgtccccacttatctgtgtaagcaacagccagatagatgggagcaaaactcaggtgacggtggagaatctcttccatggtggacacttccctgtgccatctctgtagtcgttgccaacctggggagctgttcctgtcaatgggtgcgtggttactgtgtatggccatcaggttgtaagtcaaggtgatggaggtgtccatcccctgtcgaccatctccccagtcgtccttccctctgcttacagatatcaacgagtgcaaagcctttcctgggatgtgcacctatgggaagtgcagaaacacaattggaagcttcaagtgccgttgcaataatggcttcgccctggacatggaggaaagaaactgnnnnnnnnnnnnnnnnnnnnnnnnnnnnnnnnnnnnnnnnnnnnnnnnnnnnnnnnnnnnnnnnnnnnnnnnnnnnnnnnnnnnnnnnnnnnnnnnnnnnnnnnnnnnnnnnnnnnnnnnnnnnnnnnnnnnnnnnnnnnnnnnnnnnnnnnnnnntctccccttccccctccccctgttggactttaaagccaaataacttagagcactacaaaatagcacaaaatgcagttatttgtatgtaaaaataatgatcttcaaaatgtatgagtactaaagtagagagccactaagagcctgtgcctgttatatcatatttgaggactatgtcgggtattgttttagttagttagagacatgtttcgacttcttttcctcacctgcagacagattcttacccactttggattgaaaagagacgaatttaggaatgtttctgtttgacgacaggcagtttattgcaaatgcttgaccagtgttgccagggatttctgtgcagagttgccggcatccgtgtatggaatgtccaggggtagacgttccccttttctgacctctcacctggcccttcttcagcatgcccattaaaatgtctctcttgcctgcttcctgaggctgcacagcctgggctaggcctgggtatttcagttctgctttgtcttgctgctctgcccctaagccttcatcccccttaccatcagtacctgtcctctggaatgccaacattccagcagggccctcacagctgcttagcaaactcccactttagcttcccagagcttttgaaacatctctgtgcctctgaactattgacataccttcatagctctcctttcttcatgactgtcccaggcatcctgttctcatggaagtccctcttccaccctcgcccctcctccagtgtcagagagctacagtttctccctgtttgaagtgaactcctgtctctccagtcctctccactcctgctacaggataagtctctgtggccttgattattcaccctatcttgtcccctcttccatcttccttttgcacacattaaaggaaattcctcggcccctgctcccctgcctgcccttgcccccatctctgcctattctcctagccagctattcatttcacagttgtgacagttgacgaagcatcttgaccgcagcctaaggtaacatctcaggtgacatctgagagcattctgccagctttgtaccccaggagtacaggaagaagagagcctttcctgatagatctttgtctacatttcagtcgctgctatttggcagacataccagtgccttctcgtctattgaatttccacagccaaatccttcatttttgcaaccatgagagttttcagcctgcccctcaaaaaatgccatttttgacccagccatcctggacctgcataggcaaagcagttgaggctcttccagctctagccttagctcttgtttgtaatgtgcagttagacaagtttcttaatctcagaagcaagcaccttccacaataggagatagttattagtagcactgccttgtttaagagcagagaacaaatcccttccaatgctattggctcccattcttgttagcaggtggcattctgggtaatcaggaccatcctgcctacattgtcagcctctgcagccaactgctcagcaacctttggcttctggaaaaaaaacagtcgccactcttctgtgtgcttgtcgctgcctgtctagttattacacctcttgaaagttagagtttccatacaaccttcaggttcagttcgaaagccttgcctttcaaaacgccagcttgtagcagaggatggcttgtagcagaggatggctagtctatgtgcagcggtggtgtgtatgtgccagcagtggtgtgtatgtgccagcagtggtgtgtatgtgccactgttcttgtgcttgcttcccttcatgctagagatgagctctgctatagataagaagacaaagataaagaaaatggttgaattttccaaatccccgaaagatgaaggactgggctgtccttgggcaccttgtcatagagcctgtaattctaccatgtggtgctctcaccactttacatttaccgaaactgtcccctgcttatcacaggctttattctgttcccctgaggatgctgaacggcagtcaccagaaattgacgggccaattgtgtcagtgaggtttttgtttaagagaaagcactttggtgtcctgggtatggctgataactgggggaaatcagtaaaaatgggaagtaggaactgtggctgatcccaccaaagtaaatgtgcaagttgcccattgatagcctatacaaaaagacttccatttcaactcaccaagagacagtgagcctggtgtgccagcatgtgtctttaattcagcagttggcaggaagaggcaggtggatctcatgtatgtagttcctcatgtatgtaggacgttccaggccagtctgagacacagtaagaccccgccttaataaatcaataaatattttaaaatgaaacaagacagtggcagacacatttatttaattgttactttaaaaaaatatgactcctattttcttaaatatcttttgtgtacattcaatctctgtactgaaaatatgttacaggtgtgagaggtctctccaaactttctgagagtgcccacacactattaatgattctaacagtaatataacaaacatagccaaatatgagcacataatttttctttatttttagaaagtcggataggtaagcacttctcatccgactgtgacacagatcccatgacaggttcatcccagggccctgctgtgtctgaacgctctctgactggaggcgtgtgctatggctgccttggaggctgcctctctgtgtccctgctcagcatcagtgtccccggtccacctgctcccacccttggctggggtagcagaatgaacactctccatgccttgctatggcttcctcccacatgagcacactgcctcctcacatagaccacaagggagtggcgggatctcttctctcttactacatctaagccacaaagagaaggccacatttcagaatttaaagacccgcaggccccagctgccggttgaccatgacagttttgacagttggagaaaggaatgtgcctgctgaaggcctggtcccctccaccctgtctcttcagaacatttcttgctgctctcaaccctgatttccctaagtctcagatgtgcagtaccctcccctagaagaccccattcagcactctcttatttccctctgtatttttcttttttctttttgaaatcgggggcagacattgatgagtgcaggatctcccccgacctctgcggcagcggcatctgtgtcaacacgccaggcagctttgaatgcgagtgctttgagggctacgagagcggcttcatgatgatgaagaattgcatgggtaagcgaggccagaccctcctggctggcctggaacctgacaactgtatgctcatcttctgctgtgcctctgctgccttcagggctgtggcagcacccttgacagggtgtgtgctgagcacaaaggcctacaaaatcccttccctgggctggaagcagcacaaagactacccaggatgcatctatttaaaatggataaccttgtgctgtctgcaaatgtgtattctgccttgccagttccatgagaactgtgtcttatagttgtgatattgaaaaatgtttgggtcactatatcatgtgagtgacttatgtagttggattcaagctataaacactaaaatgaccgagaacaacatatgaacccaagtctatggtgatatataagggaaaagttatatggatcacctcttaccagccattattttatacatgaacatttttcaatagtttactatagtaacagtagaagttacttaatttttatattgaaacaagtaaagcttatcccgcttctgattgggtgtgtctttatgtttaaggcacatacctaccttctaacggcccttctcccatactagatgtgtaaatatattttcctcagggtgctttaatgaatctcacgtttttacctttcagacattgacgaatgtgaacgtaaccctctcctttgtaggggtggcacctgtgtgaacactgagggaagctttcagtgtgactgcccactgggacacgagctgtcaccgtcccgtgaggactgtgtaggtgagtttttccccctttggaaaaaaaatccagtgagcacagtgggtgaaaatcaggagttacctctagtgaaagcagcgtcctgtggctcacaacaacctggaaatctggattcccagtgtctgttttctagaatgttgggcgctgggctgctttccatggaaagacctctgtgcaaggtcatagattccatggtcccggcggggttgtgagtaagctgcccaggtcactctctggacagttgtcctgtctatatacctgttcatcccctgttctctccctgcactgtcagagtacatgtagacccagttcttcacacccatgtgtgaccatgaggacccccttggtgcttcatggctcctcaaggtctcctactagaaccaagttcaggaggtgactggagtgtgcttgggcatttcctcgttccagctgctccttgtaaatccacacagtgtttaccacgtcctagtacacttgctgttcagcaaggacgtagcctgggggcatcgtcttcaggagaactcttcctgagaactctttgagcacagcccttcagtgcacacacatttatttacaagccacatagatttctgtactggtacataaaatgaaccttaaataatacactaaacagacattttcagaaggagggatttaaagtcttaagtttttttttttaattttgataacagtacaaaagatgattttacactggtgatttgaagaattcatagctggacatgctgcagtatagagactcagaaaaccacacctgaatctacttttgttgttacttagagttcattaaccttatggctgaaaaaatttacccttcaaaagggcaatatatattataaaataaatgctttgaaatgtgtgtacttgataaaaataagcataatttatataacataatgtttaggtaactgtgtgagtctgaaataatttctttttacagccagttactgtctgtggtcactgggtctgacgtacattccttcagacgagcatctcacatatacaaatggatcagtctgacattttctgggtgttccctaggaatttactaattccacatatttttgcatgacttttttttaaaggaaggtatttgacttgtaaaggccaaattgctttaaactaagagttgtggactgaaaatccacatatgcagtcacataaacacctcagtgaaaacacacatgagggccttattgtcatgcctctgttccctggaacaggtatcttccttcgggatagtttaagttgtaagggccgcacccaaacagctattagagactatgtgggcacaacagtataaacccataaactggttataagcttcatttgtgggcctacactatgtccatgcgctctgacatagcaacaactagctgccatggctatgtaattgtaattagaatcaaataacattaaacactgcacagttgtgtcacatccatttcaagggctagtaaaacactacagatccatcccagaaactctagatggagaagggaatgcttccaacacgagagaaagatctggtgtcagtggatagagggcctaacattttcactgaatagcccaggttagccactaaatagccgaggttagcctgtttcctattcaggctgcccacctctttggtgaaacctgctcttaaaggctcttgtgattatgccctggcataaagcatggctctgtttgcctttcgcagatattaacgagtgctccttgagcgacaacctctgtagaaatggcaaatgtgtgaacatgatcggaacttaccagtgctcttgcaatcctggataccaggccacgccagaccgccagggctgtacaggtaagggctgtgggctactccagtctgcatttcccatctctctgaccaccaagtttcctcaccaaatatatcctaacacttacaggagtcccttgtactataaatgaatgtgagcagggggtccagaaggttcgttggtgttttgcagaaaactcactgaccctaccataaagaaatgctccatacaccatcgctatgctattctgagctcgttccttctcacacagtagactaaatactacttgaaaggaagtaagggggatttaaggaagaatagcggtttaatctttaagcgatacaaatagaaatggcaacaaacccaaagcaaggcaatcatcaactaaaagaagacgcactggccgttgccgtgcatccgtgtggacttagcatttgacacgcttgtgtaatgtctgcgcagatatcgacgagtgtatgataatgaatgggggctgcgacacccagtgcaccaactccgaaggaagctacgagtgcagctgcagcgaggggtacgcactgatgccagacggacggtcgtgcgcaggtatggccaagatttttttaaaaatgcatttcatggatgttctactaaaaacgtggctccagactttgtccagtcgagctgagtggagaaagtgtatctgggaccgatgaaagccattcctgctttgaccggaggctacctttgtgtcatcagatattgatgagtgtgaaaataaccccgatatctgtgacggcggccagtgtaccaacattcctggggagtatcgctgtctctgttatgatggcttcatggcttcgatggacatgaagacgtgcatcggtgggtattggaaaccaatgataatttcctttttattgttctttctccttgagaccttcacacagagtggaagttaccccatctccatctcttcccatatctcttcaaacatgtctctctcccaaccttgtctgtttgtctttggcctctgagtccagtttgtgctatccatatgtgcatgggtgtagggacatccactggagttcagaaatcctaccagtggccacaccctccaaaaaagcaatggttcttcctccctcagcaactctctactgacccgtagttcctcagtagaggctgggacctctaaatggcccatctcatctatgctgccactttagctggctcggtcttgtgcaggtcttgtgcaagtaaccacagctgctgtgaatccaccttacacgcagcacttacacacacagcactcctcccaagcaaatggtgacttgatacatacaggaacacatgtaaacatggtgagaaggctttctcagtgttactttgaaattccaagccattttgccagaactgcaaaatctgagaaggaagaattcttttggaaatccttaaagacacatagttagtttgcccttcaagacaaatctttcaagtgaattgtattttgcattttgtcggttcattgcagccctgtgctaacattcagtttaaaaggtggtttttaaattacggtgatagagacaaaggtaactggacgacacaatgcgtttttttccagatgtgaacgagtgtgacctgaatcccaacatctgcatgtttggggaatgtgagaacacgaagggctctttcatttgccactgccagctgggctactcggtgaagaaggggaccacaggatgcacaggtaggatccccatgcccgcctggcttcagcctcagggggttcacaggctagcatcattccagcattcaacatcccaggacccagtcaaccagaaaacacctgccagtgtgaggagtaactggctcttagctatgccattcactgtccctgaggtgccccccccccccccgcctgagccaccctgcagggaggaagtagtagtgaacccgccctgcttctggttgatcttgcagcatcattaagtttctcggcttgatggcagcccaagtggaggacccgtgtaaagtaggaaatgaaagcagcggtcctcagccttcctgaagctgcagccctttagtacagcgcctcatgtcgtggtgactcccgaccatacatttttttttttgttgctacctcacataactgcaatgttttgctactgttacgaattgtaatgtaaataaatatctgtgttttccagtgtcttaggtgactcctacaaaagagtcattctgacgcccaaggagtcatgaaccacaggttgagaaaaccagtggcttaaaagatccaaattttcatttgacttgtaatgttaaactgataaaacatcctagattctatttggacttttattgccttacttaaatggtttctcatcccctctcccctttctccctccctctccccccaccccccgttacctccctcttttcactgcggtggttcactccacacgatttatcttctgtctcctttttttactctttagtttcacccctcttgtacagatgggactaggagatgtcaattgaggtgtgagctacttgtccctggcatgctcactttaaggacccttatgggatttagctcaaggcatcagtaaggagctcagggtattgcaaaccttttagctgaccatccaggaaaaggtagatgatgagggaaggtctgtcctgtgatccttaccaaaaaaaaaaaaaaaaaaagaggatagaagccagtgttatctgcagtgtccattcggcagcggcagcttgtagtcagtgagctgttagaacacacaaatcacactctagaaagctttgggaggaccgaatctacatggcttgtatgagtgcgtttgctatgtgtgcatacgttcacccaactgtgtattactttgcagtagggatacattgcaagaaatgggtccttagatgagtttatcactatgttgccatcaaaacgcatacttattcaagcacggctgcatgccaaggcaatgtaagcttaggaggccattgtggtgtcccttggtcccttggtcactgatcaaagtatcaattaggttgcacatgactgtacatacctgagtagatcacacatgtgtcacatgactgtgcatacctcagtagatcacacatgtgtcacatgactgtgcatacctcagtagatcacacatgtgtatttctgcagaattattatgaacataaacacatactggaaagcagtggtcctcttccaaatcacatcaacagagaacattcttgacatattctcagataagaaagagaaaacaaacaaacaaacaaaaacgtacacatatgcgaccgtttatgaaacctctagatatatagtcttgatttgtgtgtgcggtcctggaaattaaacctagatgctcacccatgctaagcaagcactgtaccactgaaccacgttagggttgtaacttttaaaatgaagggtggcttttttctaaaatgtcatccttatcttcatgaaaaatatgtgagaaatattaatagaaaggaacagtgcagtccttctcaaaatccctcctgaaatatgtgtctccatattcttcccacagcctttgtaacatgtggggggctgacactcagatcattccaggacattccacaacagctgcactttctcattccaggaggaagtggctagcaagttcctgtgacgaagggcttgtttggtcacgatcatgaagttatagatcttgctgaaatttaaaaaaaaaaaaaaagagttaaagacaataagcagttttagagctttctctgtaccgtctcatgtttatcctaaatggttgtcttttcagaaacatgcttggaagcacagttaaccagctcatgcttcatcttctttcttttcctttttcaccctggtttctcagacgtggacgagtgtgagattggcgcccataactgcgacatgcacgcctcatgtctgaatgtccctggaagcttcaagtgcagctgcagagaaggctgggtgggaaatggcatcaaatgcattggtgagtttgcagacagaaagacccttccggaaggcccagtgtcgttactgaccgttcttcgcacatttgttaacccacacgcctcccacagggacccgctgcccgctgtccctttattcccctgtaaatcaaatctgtctttggtcgtggggatcattcctgcctgagcgtttcctcagctttaatgtaaatggtcagatcacaacagagtgcttaggcatctgcctcctcatgcatgttgctcggtaaaaattatttgatgtgcagtcagtgatctaaacagctgtaacgtggaaaaaaaacaaaaaacagcaacaaaaacggctggtgtgttttcccggcctttacacagagctgtcagtgtggagtgagagccagtgaagtaagtggagaacacagaggggttcctcacgtggccttgagatgagagcaagcaaaaggttcttagcagaaaggatcacccttacagacaacgctgaagatttttcttgaattccaagaagtcttacttgaaaagggagactagggaaatctttttctcccgggttctgtaattcttgggctgaaagcctaaaaatagtgcagagccccaaggcagaggactggattattccctgtgtggtcattcatagaactttttaatacgctcctacagtaaaggacatttccaggtggtaacaattacccaggtcaaagcaagccatcagagctgacctccccgtgactgacgacgaggcagtaaaagcttatgggcccacagtgaggattaaaacaggaacccttaatatttctcaccgataatgtgaattaacttgaataaaacctgccaatcctgccaagtgtttcatacgtgtcaaatatttaaagccaatttacagaatatgtatcatcatagtttccaaatgactttgctgtgtaacaccctgtgtctgcgtcccccagaggctaatggaagcccatttccatgcctgtcctatgtgcctgctagttgttgttgctgttgctgttgctatttgttcccatttatgttcttcctggcaatccgtcagtctggccaactgatcacatgactgcctgctgcacgacgagattacagggtccaggcacttgtgctcctatgcccattcctcctttctgtcttcatcctgtgcttagccatgtttcccctcccttgctccccctacctgctctgtcccctctcctcctccaccatcctcctgaccccttccctctagaccctcaccccatccctcttcttcttctcactcccttccctcctctgtcctcccctctccctccccccatattcactccatgatcctcctgcaacttactcttctaatatttaaggtggcagaacccttaaacctcttctcacaattcccatttaactctttaactctaggagaaaccatcccagtttccaagccaccgaagccttttctggcttcagctgccgctgccctggcccgtgtacagcgccttgcctctccagatgccagaatgccacaccctgtaccttccctctttagtggccctgtgtgctctgctctctgtgagaggcactcttctctccttctgctcactgaggtcgggcttgctcatccttggaggtgggggcatggtgcttcttccgtgggcctcactggttccctgtgatccagattcggttgttcctgtaaccctcttttccttttcttttaagatttatttatttaatgtagatgcctacactgtagccatcttcagacgcaccagaagagggcatcagatcccatcatagatggttgtgagccaccatgtggttgctgggatttgaactcaggacctctggaagagcagatagtgctcttaaccactgagccgtctctccagccctgctgtaaccttaatagtacatagaaaaacatgtaatcctttcttttttgtatttgacagccatcttttctggtagcccgttagtcccatgcgatcaagaactactacatctctcttcccttcttacaaaataaacttaaaactatatgtggattctctcctgtgaagatcattgttgtcttaagcaaatcctcttccagccatagaggaaccaacagtagaagcaacaataggtcgagtgaaatccgactccagttttccttaaatacttcccacagcactagaatcagtacccagtacccggggccacagttaggacatgaatgttttggattgtgaacctaaaatcttagtgcccttccagataaaaccaaaccaaagtccgtttggactggctcataatctccacaagccaaacccttcccctgcatcagactgtgccatcttcatctctgatcctcttggttgtgctcgcttgccacacagatctggatgagtgcgcgaatggaacccaccagtgcagcataaacgcccagtgtgtcaacaccccaggctcctaccagtgcgcctgctcggagggcttcacgggagacggctttacttgctcaggtgagtgacaggctgagctcccacgtgtccatctcagaacaccaaatgtgctctccttgtgtgaagaaaacccataaagaagaccaaagtggctgtttggagtttatgtttgacccatgaatgggcacataccctttcttatccattaaatgcagaagtctaaaaaggtgtctgtgacattggtaggtgttttaaagtaatggcatatatcacctcctgttctgttaatggctgtcattgtctattactcctttataaagtaatggtcaggaaaatgcaggctttggataacactgcctgggttcacagtatctccaggctttttccctgctatcaacctcagctcatgagcatcctgtgtggcttcagctcttcttgtgttaaaataggaatagtgaccttagcagcacttcttatcactgagtgggtggtccagggaacttctcagcccttgaagatgggatgtgtaatgtcacacatcaaaggtaagtcatccaagctgccacttctccccttggagttcgatagctgtcctcacagttgtgaaaggaataagacatgcgaaggacgtaggaaaccatactgatggagatttcactcctgcccctccccagggctcaatggtgaaatgttgtctcattacattcatatataagactaggccatcctttcaggcaagaaaattactttatgagctttatgagctgatcttcattcacgcttcaacctcacaattatgaaactaaatctgtaattatccacacagcgtgctgaactcatcagactcagcccccccccttttttttaagatttatttattattatacataagtacactgtagctgtgttctgacacaccagaagagggcgtcagatctcattacgggtggttatgagccaccatgtggttgctgggatttgaactcaggacctttggaagagcagtcagtgctcttacccgctgagccatctctccagcccctcagtgtccccttttaagaaagtgtgtttatctggtactcctcctctttaaagcactggctcttttgtatttcctggactttgtatgtgctgtagtaccaaagaaaggatggttttgatggtaaacacatctgcaagcacaatagggttcagggggacccttgcagctctgttgttggcttctgtcagcctggatgcacctggtgagctggacgaaagccacacaccaggtaacagccacttcacctggcggctcagtaaacactggtctctgtcctcctcctctttgctgcttcagagagttaagtaagtcatagggcaggtctatgaaaagtgtctgcctgcatcattttaatcagatgttaggaatagaaaagaaacgttgcttctatggtatctctgatttcctttgtgccacttcagcgaggaaagccaggaaggggcgttgctgtgctttcagatgaatgtaattccagagctcttggtcacatctactaatattgctttaatactgattcatccgtgggtatgaagaagaaccaagagaaaccccatcgatatatattctagctgagtgttctgaatgcaagttatggatctctgatctcaggccacacatcccaaatctagtgaatggggttaaccattgcttcatattaatgaacaccaactctagccactaaaaccgatttcatcaggaaaaaggaaaaatgtgtggcgaaacctggaacttaacggagacgtctttttattcggcagatgttgacgagtgtgcggaaaacacaaacctttgtgagaacggccagtgcctgaatgtcccgggagcttaccgctgcgagtgtgagatgggcttcaccccagcctcagacagcaggtcctgccaaggtgggtcaccacacttccagttcactttccagttggatcagctacagtgaaggaaaccacgaaaggggctggaacggcctccacctggaagcagactgcacggcacatgttgcacatataaaagctactcgtttaagcatggattattttgtggaatgagtaatgaggaaggctggctttcacctctgatgaattttttctggccaagagccagtagttgaaagtttggccccatcttctcctcctcctcctcccctcctcctctccttcctcctctcccccctctcctcccctccctctccccctcttcctcctcccctcatcttcctctcttttttctccccctcttcctcctcctcctcctcctcctccttcaaaataatttccttttttcgttttgtgtcactcattgaatgacatgtgacatgcctcttcagtttttaagtggtgatcaactattgcctgctttggcagtcagtgtttatcacagtcagcaaagtctaagtagcttgtttctggcatttccttttatgtttgagtctacagtgtgtgtgtgtctgagacttgaagcctcacaagtccatcaaggacttgttcacctcagctcagagataaagcaccttaaacctaagatagttgaaacaaattagtgtgactatattaaatgaccagaagacccttttaaggttgagatacaactgtttcaagatagcagtgtgaaatggcttttctgtgcaacttgaaaaatggtcagcaagtaaagtgcttgccaacaaggctgatgggatgaggtctgtccatgggacccgcatggtggaaggagagagccgacttccacaaatcatcgtctcaccacacaagccatgcatgcacatgcatgtgcatgcacacacacacatggacacacatgcacacacacgtcctgtctaaataaatgtaatatttaaaaatcatttgtaaagaatcatttccttagaaaagaatgacttttctaatctagcctaaaatgtcatgggtgggctgcattctctcagttattgagcagtttacatattaaaatctccaccctcttctgtgagtacaaacacattatttctacagctctgtttctacactgtattgtgcctttgaggcatgcatgtaagagtgataacttcgcatttattgaccttgggcttcagcctcatggaaatagctttattggctgaatttctggttttagtggaaatatacattttatatttttatctctgattacatggctctgtgtgtggtggaacagggcggtgtgtgtgcatgagagtgtgggtgtctgtggagcccagaagagggaatcaaacccctgaagctggacttgcaggtaatgagtcactcaaggtggccgctaggaattaaactcaggtcctctagaagaacagtggagtcttgactgccgagccacctctccagctctgttactagaggtattttaataaaatacgtaggtatttatgggtagtgaactgaaccgagttatttcatggtatagggaacagcattcttctctgtttataaatgatttttgtggtgataggtcagattataaaataaataaaaatttaaagtattaaagaccttttaccaatgtacttaatattaagtgttatgtaatttcatatttcaatttgccaattacaaaatgtgtactatttgctttaattatgtagaacctttcatttgtttttgcttttgaaaacttcactcatttgatgggtttgcatttaatttgtgtagtttgctaatacgtctaagctagttctttctatttgagtatattgcaatccagacagttataatattagacgtacaggtctggggtgtagctcagtgataaagcacttgcctagcatgtgagaatctctctgttaggtccttaacactgcagaagggggaaagtataagatatccactgagccaaaatagtgcttgttttatccctttcttatcctgtgcataagatatatttacagtttatactatttatctaggaaaaaaacaacagagaaaagtgttacttcttataaatatccaagaatttagaaaatgcattgttacatattaaaatctttaaatatctttgtaaacaagcggtgaccttatcttatttttcctttttcttctttttctttcttttttgtcttcagatattgatgaatgctccttccaaaatatctgtgtctttggaacctgtaacaacttgcccgggatgtttcattgtatctgtgatgatggttatgaactggacaggacaggaggaaactgtacaggtgaggacagccaggatcaactgcgtttcattgcttggcaccagtactccatgctaaacatataaactcctcagagttttccggaaatatctgtacattaggctgtgcatgtttccaaaatagaaaagtatactctggtatattcaccttctacaatgaaacgcatttgtgtttagataagcagcttcattatttaaaacaaaaacagtaattacatatgtgtgtatgtgaatttttacgtatatatcacatttcttatttttttaaataaaatttactataaacaacctgtagttaaaagccatcacatactaaaattaactaggaccatggtctgtgcctctcagtgaacttctatatgggctgaatagtgattctgaacctgtggagcacttaaatttcttcctcagaattgcaacttttagttattggttatatgttaggatattaaatgacattgttgaaaatattataattttctatgagttccaggacattctacatagtgaatttcaagtgagccaggactatatagtataatactgttgtctcctgcctccctacattctgcaaacacacacacacacatacacagagggagagagagagagacagagacagggacagagacagagagacagagacagagagacagagatgcaccaagcatccattaaatccttaccattgcagaacctattttgtgtttaggatgaatcttagtctttagttagctgagtccttcacagtgacctttagtaacctgggagagaggtccactcagtttcttggaacagcactttgtatatggaagtaaagatgttaacacgggcatctggaatgttcacagatattgatgagtgcgcagaccccataaactgtgtcaatggcctatgtgtgaacacgcctggtcgctatgagtgtaactgcccgcctgacttccagctgaaccccactggcgtgggttgcgttggtaagtgaaagctaagtgaaataaatagaatcacgtaaagttgaatatttcaactctcgacaatgaactataataggacaattttgagtacaaaaccaagaaaggaggtaataaatatttacatgagtagtgactaagtccttactaaaataatgagtttttttcagtatagatttgctcttctataaactctatttttaaaattattttaaaacattaaaaaggatctgctgaatgcagataataaagaacaatggccttaacttctgaagaacctacaaaccataaatttgtctggcttcatatgccgaagatattaacacactgattctttgacagatgtgggtaagatttgtggtgatacagattaagaaaccaatttaatcaactgtgcagatgtttttaaatgcaatccaagccatcaagaagctgaggcaggaggattgtgtattagagtctcgcctatgctgcaggatataacctcatctcaaaacaaacgagaattataagcatttggatatcatagaattcatgcacagtttgtccaaagagcaagcatgtcagatacgtgacaaaaatgtaatttactgaaatttttaatggacgcattaaaaaccgtttttatgagagcacacacagaagctattatcaggtcattggaatggtccaggaggaaaagaaaatcaggaatggagaatgaagatttgaaagggggaaagagaaaggaaggaatgtcgaatgaattcaaacctaataggggagggaccatgagttaacttgggtctctgtacccaagatttggcaaccgaaaaaaattgaagtataaccacgagaagcagccagatggctgtgctgtgttcagccagaagtgaaaggtactttgtggactcataaaaactttcaaaatactctggttgggatgagacctctttggggggagggggcgtggcctggcccagaacagttcttctgaagaattactttggctacaaagacaaaaacagattggacttgggccaaagatgaaagctgagatacatacgagttgggaaaccattgcaatcatctaggtttaaaaagaatgctgatatggggaattcaggctaaggggaaaaggcagcggtgacgtaagtcgtcagatgcatcttgaagataaagttagcaagccttattattactggtgtgaaaggagaatgagtgtaaagggttagaaatggcagcaaggctggacagctgaaaaagataagggaagttccatcgcttgaaagccgctaagacagggggagaggtagcacagagagaggagtgtccaggttggttgttgggcatgttgacttggaaacaagtagtaaagaaataagcagaaaggtttagaactcagaagaaaggtgagagaattttgaacttgaggtcatgggtgggacttgggggaggagtaccatctaaagccaggggtcaagatgatgagtgtaaatagagacaggcagtcttcagagagatgcagtttgccagactgaacaatccgcaactgttgcagtgaagattaaaataaaaccatcgggaggggtgggtgaaaggtagactgagattgttaacatgttacggacttagttacatttgtatgtctccgaggtgtgccaccacttcttcacaaactcatgaggcagattagtaaaaccccagtttctcttctgttcacactacttgaaatgtccagagggcccccaaataagaactgcctcactttcttgcttataccacaaatagacagaaatcattctgtggtttctagtgactgctgctcaccatcttttacagttgacttgatcttgtgatgtttaaaagccgaagtttatagcaaaagattgtattgtgctaagaattaggatgtaccttccctgtcaacgtacaaaatcttgaacttggtcctttaaatgccttcctgagaatttctccccacagtggggaccactttaagctcttctgttgctctgcagacaaccgcgtgggcaactgttacctgaagtttggtcctcgaggagacgggagtctgtcctgcaacacagaggtcggcgtaggtgtcagtcgctcctcctgctgctgctccctggggaaggcctggggaaacccctgtgagacatgccctcctgtaaacagcagtaagtatggaacagaaaggaaggaaaacacttctgtttctgttccaggatctagaaacaagttgctattgtatcctggactgtgggcagcgggaggggtggccttggactgttgtcagtggttatgctgaaatccgccaagagtgttttatagagaaggaatttcagttctgtccttcctatttttttcctatcgtgtttctctttaaaaaaatatcatctcaaccacaatgcagtctgaatggtcataatatggactatgcgtgggaccacagataaaggctgtccccagtccttcttggaggttgtttgttcaagttcataagtggagtgtatcctgaagtcagtcaccacggagcactttaaaagaaaacatgtgttctgatatgtacagaacccagacctttgtaccatagactcctggcatttttttttatttacttgccaaaatatttgtgatatgaattatctaaaaggaagtgttttcttaaaaaaaaaaaaactaaacaaacatggcttttgttatcctactgcaagtcattgaagtaatgatattttgggataaaatgtgatatacattattgaaaatgcgtttaaaaggacacaggaaaatgcagacacccctgaggctgtgtgatttgagcttggcactgtctcaaccgccaggatccagggatcaaaccgcttgcttgctttccattgttttgcagctgagtattataccctgtgtcctggaggcgaaggctttagacccaaccccatcacaatcatcttagaaggtaagcccatcaccagatgtcatgtaggcttaaataagctaaataaatagcctagttagagggaagctgggacctgagactaaagtcagtgtgaagccttgccagaagaattcatgggcagaactgcaggtaggcagtctgtcacacacatgctatgcaacagttttaccaagaagtagccatccattcccggcatctggtgttcagttgttgtgcagagaaacccttgttacattgtccccagcaaattaccgacagcttgcttccattactctccccagaaaacagcaggcctgcaaaaaaggcaagaaaatcacagtcagaataaacccagcacctaacggcattcattccttgagttgcacagacgtctgtggtccatacaagatgccatgtttgaaagctgcaatattgactctttggtcatgatttttatcattaatgggttgtctcctcttgtagacattgatgaatgtcaggagttaccagggctctgccagggtggaaactgtatcaacacttttgggagtttccagtgtgagtgcccacagggttactacctcagtgaggaaacccgcatctgtgaaggtgaggaagcctgggatgttccctatggtcctgcatccttcatcctgcaggaggggtcttttgagactgttaatagcttttttttttctttttttggagcaatgctgttcatttgtatagtgataaaaccaatttgcaatgatttctcaaaaaaaattttctgagtaaattgattgatgaaccataaatggaaagcagaattgcaatatgaaggtggtgaacactgatatttttaagtaggaacaggcaaacttcaatgtgactgtaagttaatattggttgatactttctgaatgtcagatataataatttctgaatgatgggtataatataaagaagttgggatgtcgtacagattctttttccccctccccccaccagctcttgtcacataccagttatagttttatttttaggtgactgctattgtttcaagttctggctggaggtgtagcatcagtgtttgtgtgggatgaggtgttgcctctagagctgcacattaagaatataccattattacttcagttacaacctttagttttgaacttgttggtgaaatgcatctgaaagaaatgtgacttaataagaaaaagacccactagttagcctgcaatgagaacctgtgagaggcttctaatttgaaaggagggtctcatagcctgcattcagttgaaagttgctgttaaaatttaattcgaatggcatgggggatggggggggggaacagacttcaaagaaattcctcttggagaatgtgaatttccgcaaatgtatacaggcataaggcaaatttggttttgcctctttagtctatttttgtaattcatagtatttttagggttaggagctttttgttttttattttttcttttccttaaagaaatgtggttttgtggcatgtaaatgtaaacacatcatttggggtttttttctttttaatttctgaatcttataaacatgaaactaggaaatcacttgggatctgcttagtaagctacgctatataaattcatagagcaatcttaactcctggacattcctgcctgttgtagatatcgacgagtgctttgcccatcccggcgtctgtggacctggcacctgctacaacaccctgggaaattacacttgcatttgcccgcctgagtacatgcaagtcaatggaggacataactgtatgggtcagtagccctcactgagattaacgacccgagtcaaggttgctgctggctttgtacccgcggcacttccgttctcagatttgctggtccggaaagtttggaaactaaatctttatgagtggggaagtatttcagagtcctatgaactgctgctctgcaaatccgaggtttaagggagaaaaaaaaatatcaagcattaaagagttacagatcttagaaaattccgattgtctatgtttgtgaaactgcatctgcatagatgagaggccatttaaatgtcaacagttacctctttttttcagttcaattaattaatgaaatttttttcaattaagtggatattgtagtagagaagggaatacatgacacaatattgtcacctgtagaaaaataaaatgccttgcctaaaagcaggacatgtcccatttgaaaacaatgagcgagatagaagcttttccacaattgtgtcactcaggaaagctggctgagaacaagccggctaaccgcggctcactgctctggccgcctcactgacggatctctctccatgtagacatgaggaaaagcttctgctaccgaagctataatgggaccacatgtgaaaacgagctgccttttaacgtgacaaagaggatgtgctgctgcacatacaatgtcggcaaagcctggaacaaaccttgtgagccgtgcccaaccccagggacaggtaagcacagctcaggctctgggagaggctttgccagtgatacattgtcacagtgggtatgtattccatgcccaatggcaaggataggtaggcacagctcaggctctgggagaggctttgccagtgatacactgtcatagtgggtatgtactccatgcccagtggcaaggacaggtaggcacagctcaggctctgggagaggctttgccagtgatacattgtcacagtgagtatgtactccatgcccaatggcaaggacaggtaggcacagctcaggctctgctgaaggctttgtccgtgatacactgtaacagtgggtgcatactgtagccagagatgctcaatctcagagagatctaaaaagcttgatttcccaaatggcatgacccactttgggaaccaagcagtaacttctgagacatgtcccataatgtccaaatcttgaaaagaggcattgttgttagagtttatagcctttctcaatttacaattattatcaaacaagactggccattccttccttcatccatccattcatcaaatgaatttattgagaaactactatttgtcactgtgttcagcatagaaagtataatattttggcaaagtaacttaaaagctactaacttcaataatagttgtttaaattaaatcttgaaacatagattaagaagtatttgttaatgaactttgcttgagaagtatataaaaaagtatttcataaataagttgcatagaacatcttgttaatgtgttccttgtgcagttttccatacaacacacaggaacctttacatgaccacaattttaaaattatttttattattgtatgtgcatgggtattttcctttatgcatttctgtgcctggtacctacagaggccagaagggggcattgaatctccaagaactgtagtatagataattgtgatctgccacaagggtgctgggaactgaaggcagaagggcagacagtgccctttgccactaaggcctgtctccagcccagcatggagggattttttactagcacaaattccattgaaataaaaggtgagccaccacgaagaccagactagcaaccacttgccttttaattactctccgtacagacctcatgtgacctagggaatggtcctttttcatagtcatagacccctgaagttgaacggagaggacagatgagaagctgactgtgcatgtgtcaccaaatactgacactgcattcattcaagcacttcagttataagaatgctaacataagctcaaggagagaggtgtggacaannnnnnnnnnnnnnnnnnnnnnnnnnnnnnnnnnnnnnnnnnnnnnnnnnnnnnnnnnnnnnnnnnnnnnnnnnnnnnnnnnnnnnnnnnnnaaaaaaaaaaacaaaaaaaacccgagggacccttcttagaaatgacagatttattttggctcatggtttctgaaagtcaccatcctgcgggcaaaagccaaacaaagcagtttactccggagtagcagaagcttaaagcaccagcttgtgtacagggtgtagaccagggggcagaggacaaaggcaggagccagaagcaggtgtgaccgtgacccctaaagacaagccctcctggatgtcttccacctaatatgcccaacatacaatttatacaatatacaatttatctatttaatatacaattatcgataaaccatgcatttaaaaaggccgtgactgcacaaggcacagatgcgtgggaaaggttttgcaatggagacacaggccagagatgacccatgaatgaggcgagagttttgtcttcttcttcctttttaaacatccctacctgctggaatatgaaatttgagaaataaaaggaacaatttgtcatgagatgaaatataagactgtaagggttattcttacctaaaattcaccaaatcaacagaaacttaaagagacagtgactcgttggagcaaaatgttttcagtggctgttatgatacacgtgtgcacaactccacagactacagtggtaaaaatggatatgacatgtgattctaagtgccatcaatatgagatttgctcaattcagtgatttctaatagactagtcacttttaggtcagtctatctgtctgtctgtctgtctgtctatctatctatctatctatctatctatctatctatctatttacctaccttccaacctacctacctagcatggcttgcccatggagtagcccctccctgctactgttgttgatctcaacttctagaggagttatcagaaagagtaaatcccctgcttggattgcccaagtttcagatcaggtctttgatgaacatagagaccagtttcccaaacctaagcccttcatttccttccactgaaaaaaaaaatgacatttattttcccaaactagtaatcttggactttagacttatggagctttataattgagaagggtaagggcgcctccacttcctctcatggaacacagatgggcaagagaaggctaaacacacccatcaaagctgcctccacgaggaggggaaatgccccttccttactcactcttcaaatgcttggactggagcttgatacccaagctgctgctttaagactggctgtgactaatatcgcactgttcttgttggcgaaaataatggcataaaggtattttaaatgtgtctgctccacagctgactttaagaccatatgtggaaatattcctggattcacctttgacattcacacaggaaaagctgttggtgagtttgtccccattgtatttgggaatgtacatatatacatatgtaaacgtattcatatgaatcatattttgtactcacatgtctcaattcaatagtactccaaatatcaaatgatctggactccaggctaatgtgcttagttaataaaccgagcaacaatgcttacattacgttgaccaagtgttaataaaattgttatattctatcagcatagcctagcaattaaattataattactttgcaatctcaagattccatgcatgccacacataaaaatgtgaatttccttgtcatgcatattgttttacatggttaaataatctacctcattttgtgtatggaggcatggatgtgccatatgtatatatgtgtggttacatacgtgcatgtgtgtcagtatttattaaaagccagagactgacatctcatgtcttccctgtctctctctacactattttctgaaacaggctctcccactgaatctaaagatcccttattcagctagggaagctggccaggaactccagggatctaccctctctgaccctccccatcacagccctgggattacagataaaagccagtgtgtccaccatttatgtggctgctagggatctgaagccaggtccctatgcttgtgtggcaagctctcacagaccgaaccacctctccagctccacacgttattttaatcactagttagtcttttcaaaagtagagcttaaggtttcagtatatttttataccatcccctttgtttgatctcatttgaatatacagaattccttttccgataaattacttccatctgaatggacttcagttgctaattctagttttttctccatggcttaagcaatatgattttaagtctctctgaaggaatatatttgagcaagtgtataacgaaatatatcaacttaaggaaacatagctttatcagaggattggcagctgtttgggtgacctgatagaacttgtggttggggctcaatgtccccaaccagggcaagaggttcacttgtcttattgcccactaaggtcacttgctgtgttttacaaaccatcttcactgttctaaagctcttttgggaaactaactgctctgtggtctctagttcttcagaaaccacaagactgtttatgccagtttgtatttgacttgaacagagagtgcatattttcacttcaggctacacatagcatcatccttacggggtaaggtgttaaggatgtgtagcagagaaccacgtgtattttacctaatccgttccatttcagacattgacgagtgtaaagagattccgggcatctgtgcaaacggtgtgtgcattaaccagatcggtagcttccgctgcgaatgccccacaggcttcagctacaacgacctgctcttggtctgtgaaggtaatctgagaaagatagggcttctaggagggcgtccagttttgtgtttatgagctgaggacatgaatgtgaccccccacccccaaccccacccaaagcgatagtgaacagctgtttacctggacctgtcactcttgcagacatcgatgagtgtagcaacggcgacaatctatgccaacgaaacgcggactgtatcaacagccccggcagctaccgctgcgagtgtgcggccggcttcaaactctcccccaacggggcctgtgtaggtaagcaagaggcaggcggtcaccaaccacagcacaccgtgaggtcccctgctcttgaagggctcccttgcttcccctccacagcatcctctcaggatgactttagaaggactgtctaattctatctctctgtcatgctgaaaggctcccaccgtaactttcagattagtttgttgaggaaagaggttgcttcggtggatttctctggtagaaaatagaatctttgaggtcccagtcaacctacaaaacttgcatgactggaggggggggcactgggttcttgaaaggcttgcttattttcagtcagctattgttctggttcattctcagcctgtctataataattaatagcaggttagagaaatgctctgtgcaaaacaaaggaatcttaataaaactcagatatatgtataacatgtgtccctttctttctttctttctttctttctttctttctttctttctttctttctttctttcgttcttttttttttcttctttttctgttttagatcgcaatgaatgcttggaaattcctaatgtttgcagtcatgggttgtgtgttgatctgcaagggagttaccagtgtatctgcaacaatggctttaaggcttctcaagaccagaccatgtgcatgggtaagaagggtgttctgtcccagggagtgacgtgaggctgggacttaagggcagatgatggcaccaccatatgacctcagcaacgatgacgtctctgccatgctaaacagtttaaggctttgatgtaaaactggcaagcagagacaataccatactaggttctcaaatgctcagcaagtctcagcattttgctccagaagttcctatgagatgatgtgcgttcaggcacacttggggctaggtggaaatcacccacacagcatattttggagtgcaaacgaggagtaagggtgaccctactaacataagcaccatgcaaatacacattcttttttattgagaatatagcttaggacgtaacagtatcagtgtcagctttaactcttaacatgattgcagaagtgaatataaccagcgtctttaaaatggattcccatcaggcaacatagcagctacataaggaaatgctcacagtcagctattggatggatcacagggcccccaatggaggagctagagaaagcacccaaggagctgggggggatctacaaccctataggtggaacaacaatatgaactaaccagtaccccagagctcgtgtctctagctgcatatgtatcagaagatggcctatccggccatcagtggaaagagaggcccattggtcgtgcaaactttacatgcctcagtacaggggaacgccagggccaaaaagtgggagtgggtgggtgggggagtgggtgtgggagcgtgtgggggacttttgggatagcattggaaatgtaaatgaaataatacctaatttaaaaaaaaatttttttaattaaaaaaaaaaaggaaatgagagtggggcttaggttgtttacaaaggcacatggtaggggggggggggtgctctgaagcggattgccagaatgtcccaactctgatgtcagtagggggctgggcctctgccagagttcctctctgtgcttcatatttgaaagaggaaaattggatttaaaatttgcttattcagatgtagcacgctctctgtgtgggaaggccaaggctgtgtacccaatctttggggattctagacgcttgctgagtgagtgtgaaagccgggtttcaatagtgtggaagcgttcccttcgtggagtatctgtgcaacgaggagcagctggggaaagcctcagtttacccactgctccctgagtgcaccttcccaccatgggctgccccagagtgatggggaaatctctaactggcgcctgtgcggaggctatcacaagtccccgtcccctgtccatgcacattgtgggaatgcttgcttttacaagagacacgggggtctccgtctatgctcttgcagagagtataatccgcccttcgtccccagatctgtgatatttatgacccagaaattcatatgggaaaaaaaaaaaaagccgccccagtgttagcagttcttccatgataaaagtcagtcagctcctcggacctccgggacacagctctccttctaaagagctgtgcctgttccttgtacggtggctctctgcaggctggcctcccagctcaaaggccttaaagggactctagccagtccaagaatgaccgaccatcacagctctggcagaccttgtccttcctgagtcactctgcctcgctaaataaatgaataaataaataagagttagattgcatttctaaagctacccaccaaggtctgttcccttatttggccacatcctccacctgagactgactaccgaggtctagctttctaagtactgaagtcaagcaatcaaacgaccactttgagctgccctaattagcattcccaatcaaaatgaatcctaacatgggtttcaccttcaacttttataaaccaccaaccaccattgggccatggctgtctcctctccatcaagaggagtccttttgtccccctcccagacaaatacccctgtcccctctccctcattttccttccccttcttctttgttctctatctcctgtctttgtcccttattccacaacctttttccctctggggcacataagtctcctttgtgctgagaacttggttttgggggtatcctgtgctgaaaccgatccttccgggccctctgtctcctgtctggaataaaactgttcatgccaggaattttggaaagcttatgattaattctaaatgaactccttggatttcactatttcatcaaaggggctaaagttttccttctgaagttaagatatataaattctttaataagtgttaagaatattttgctatttgacaagcaagcccgctctctgcaacatctctgccggtggcacgcctctccgccctctgttgctgagaattgtactgactggtagggaattaaactgttttctccttcgtaaattcataagtttgatttgcgtcccccttttcaccttcttatttttattaagtaagcttgggtccctagcactctccttagtgcgggcaagaagatgttagaggtgcatgcctggttctaggtaaaagctgagttcttcttggcagatgttgacgagtgtgagcggcacccgtgcggaaacgggacttgtaagaacactgtgggatcctacaactgtctgtgttaccctgggttcgagctcactcacaacaacgattgcctaggtaagtctttctgtcctcggacctcctttatccctgcagaatgtaccgaaataaaaaaaaaaaaatacataaataaaaccaagagcacgggtgacttttgttgctaaacttgcacgtgtgccaggaaataggcaaagccattgcgaacccccagttgccctcagtgggccgtgtactgtttccagacctttcttacaaatccagtctatcagggtgaaaggtcactgagatgcctgtcagtggatcaggactgatttagtttaggctctctgtcccctcgtggtgagacagagggaccctctcttactcccgtgttacacctcacaagttgtacgacttcattcctaatccacacttgagcctccgcagatttctacacacacaggtctgtgtcttaaaatgtccttgtccatcagcttcaaaagcctgtatgcctttccccacccccactccccaaaaatgcacagcaaacaggttttgagatgaaccctcaaactgcagtggtgcctagtacagggtttcagcttttgcctcacaatcacatacaattaggacatgggaactgatgctggagatgtccccgcaaggaggtggagcaaagataaaaaaaaagggtaacagtgatctattccctttgtcatttgtgtacgatccttatgtacaggtaaaggaattgggttatatcccatagtcctttctcctctgccaaaagaaatactctccaactggggggaaaaatggaaagattcatcttcaacctgtaagactttagtttataaatgtctaaattatagctcacgcccttgaaaaactgaggagtccctccatgttcccgatagggataatgtgtgccgttttcttttctgttattagagtgcggtgtagaccttttgtaagtgtgtgtcgacacgttccccactgaagcactgactcctctcttgctttgcagacatagacgagtgcagctcgttttttggccaggtgtgcagaaacgggcggtgcttcaatgaaatcggctccttcaagtgcctgtgcaacgagggttacgaactgactccagacggcaaaaactgtatcggtaaggaactggtggcactcgcctttaatcccagcactcgggaggcagaggcagggggatttctgagttcgaggccagcctggtctacaaagtgagttccaggacagccagggctacacagagaaaccctgtctaaaaaaaataataatgataaaattaaaaaaaaaggaagaaacgaaaagaagagaaagaaactgaagctgcgcagctaatgagacaatatgaactcccacaggcatactctgctcatccacatcacatcgcaggactgccacgacctgtgtcggggtattaactgccacctgggaagacatcatagggagagtttttattaggggtagtgcttgagagtaggtctcaataaatgtacatgaaggaatgaatcataacaattaacagccttatgaaccagctacaatatcggaggagtgacagggtgtctttgtccacagtgacccaacagatcagagggcccaagtggaatctatgtcactgtcatttagcagacagatgtctgcaatgattgtctcatgtctgggttacattttttttttttttggtcttctttctctctaaagatactaatgagtgtgtcgcacttcctggctcctgttctcctgggacctgtcagaatttggagggctccttcaggtgcatctgcccccctggatatgaagtgagaagcgaaaattgcattggtgaggatcgggttcattctgaggtcatgagtcgtgggggagaaaaaagcgtgtgggagaaaaacaaacatcaaccccagccactgtgcacatggaggcctccgggattaaacacatagctgcctgcatctgttttattgagccatcaaaaatggttgggttagcagcttagggatgtgggcttgtttccatcaacagaagtcttacttcgagtcaaggggttttccttatactctgtagccgcattctaaatgtcggggaagaccatctactaaattttaaaaatgtctacagtgtaatctttggcacgtgattttaaaatagctattaaaggtgtccaggctcatgaaaatatgaagcagaagcagaagcctcgatggttctcttgaccgtttcccctcttgggtaggtgttacttatacaaaagtagaaaatattagtccccttggatagctggtgtcttctacggaacagaacgctgttcagcctcagaatgggccctcgggatgccctgcagacccgatgagggcgacctccgcacagcccacttgatcccacgttctgtgaattgctcttgctgcatgattgacatctgaagcagccgcatccaagtgagggtttgctagcgcagagggatctcaaaggatgtctttgtctctgaggctttcattccatcacccatgtcaagatcctgaggatgaagagctctgatgttcacattcgagacagttgctagttaaaagggctacggacttcacagaattgaactgtgtttcagaccaagtgactagggagtatgagtatccaaagtcattctatatagtatatatagtttactatgagatccggtcatatcttctagccaaaataataaaagcatagtcaaatagtcaaatcaactggtaaaacgtggtaaaaagtttcttgaaagtttaagattatctctgccattttgttaaattttgtttgggggatatggaagaggaatttttatttgtgtatgtatatgcacagatgattttacagcaaagtaacaaagaaactctgtagtccatcaatccctttctttaaagctagcagtattaaccacaatagtgtggtgtgtgtgtgtgtgtgtgtgtgtgtgtgtgtgtgtgtgtagtgtataagcatgtgcatatgtggtatggtatgtgtgtggacagtattcatgtattgcaagtatatgtgtatttgtgtgtgtgtggtatgtgtgtgtatgtatatgtgtgtatagtgtgtgnnnnnnnnnnnnnnnnnnnnnnnnnnnnnnnnnnnnnnnnnnnnnnnnnnnnnnnnnnnnnnnnnnnnnnnnnnnnnnnnnnnnnnnnnnnnnnnnnnnnnnnnnnnnnnnnnnnnnnnnnnnnnnnnnnnnnnnnnnnnnnnnnnnntgtgtggtgtgtatgcatgtgtgcatggtgtggtgtataccatgcatatgtacaggtattgcccttattcccttgaaaccgtctctcactgaacctggaacaaggctcgcaggcagctagccctggtgatcctcatgtatctacatcttagagctgaggctacagtcacatgtgaccgacccccagccttgacagtaaattctggggacttaaacttgggtcttcatgtttgcacaatagccagtgagctctcaggtttggtcttcatgttcaattttggttcttcattgtatccactcccgccctcatatggagtgatcacgacagctgcatgtaagctagtggtatgggaatagaaacatgtgtgtttccgcaccgtagcatcataggtacctctgtcttgttgaaagcacccacgtctatgattcagtttacatttcattcgcattgcctttcttgacctaaaccttgctccttggacaactattatcttcctaagaaaagtttgtttttagttaaattactttaccctatactcattctataccaactaagtgtctcttgtaccagtttttctcagatgagattcctctaacatggtcatgctcagatgcaaacacacacagagttgtgtgcacacatacacagaggcatatgtgcattccacagacacggtggtgagaatgtggcagctctgatatatcacagtgggcttacagaagtgcagatttgacttttatggggtctcctacctaactggagagacatagtttgtgaatgaacctgttgaaaagcttttccttacaatagatcatggtgagccctgaacattaggtgtgtccgggatgtaacaacactttagaaaactgacgcaggtgtgaggtggcatgtcacagacaccagccacaaggctcagcagtcacccaaagtccctcctaagtactggataggaatttactaatcagagaaagataaatcataactagaagagatgctctggaagtgggcaccatagcattgggaaggctgaacttggtcctgtaagcatcacgagggagggagtttttaaaaagggatgtgatctgactcgtttattaaatctttagagagttaaattgaaagcatgtgccagacatcacagtgggggcagaaggcacaacatgagtcagatatggcacagcacagtcttggtattgcattctaactttcttgaagttgtagtattttgtctcttgaataaaataacctgctaaataagcatctctctctctctctctctctctctctctcacacacacacacacacacacacacacacacggtgagagagacagagacagacagactgaaaaccaatgggaaagattccttatattaaagtgtcagtctgggctttgggaaacgatactctcatggtctcgttccattgaccacatcattcagtaaaatcagtcgcatgtttagaaggtggcggtgtgaagagaagaacagagaaaagatgcagccactggtgaagaaatgtacagtaactgggtggtatccaaaactgtgtagagggtactgagtagtgtaacaggcagctactcacttgtgtgtaggcatcaaaaagccagagggatcccgggttgggtttccaaaggaggtgtttgggagagggtccatgggtcaaggctcaatctgtgagacatatatgtcagtcgtgtcagatagacagagaggtcccacccatagttatcaagtgtcaggacatggaggtgggcatgggaaactctggcatgtggctggctcaaattggatatgatctttcacttttaaagcaacagtttaccttaaaaggataaattcgctacctacagagtgtcatctgcagttccatttagtaaatatcctttaatgaatgaccattggagtatggacaggtagatttattttcaactgtagaaaggaatattgattaacaaactctcactgttctgtagatataaatgaatgcgatgaggaccccaacatttgcctttttggttcctgcaccaacaccccagggggcttccagtgcatctgtccccctggctttgtcttgtctgacaacgggcggagatgcttcggtaagtggtagactggcctcctctgtcgccctctctcttcattgggctagggctttattatgacaaaaatgaggtctacttataatacaccatgtgcaactgcaacccagatttctcagcagcgtctcagagactggccgtagaacactctgttagcgttattaacacatactctctgattttatgctaagagagaatttgtctcactgtaccgtttttatttcattgctggcatgagctgttatgtatcagtacatgagttgcctcgggcacagtttaatttactgaaagttaaattcgttgtttttatacagctttgatggaagagtcaacgggggagactgtgggaatatgttcccgacttaggctgattttacaaatccctaaacacatcataaaaacattttagatctaataacattttgtacgtggatcactttaaactagcaaatgaaagtgacccatggagaatgcccaggcctgtctcttaactactgatcttgtgtgtgccctgtgtcctgctcatgagaaatgttcgatcagaaccagtcacatcatattgtcccacgtgtttaaagagcggtgaggagctctgctgtttgctttcccgattagatactcgccagagcttctgcttcaccaactttgaaaacggaaagtgttctgtacccaaagccttcaacaccaccaaggcaaaatgctgttgcagcaagatgccaggcgagggctggggggacccgtgtgagctgtgccccaaagatgatgaaggtgagagcaatggcagggagacagagaaagagagggagagggggtgggggatgagagggagggagaaggagagaaggaggaagaaggagagggagggagggaattttgttgagactttgtagagggggaagttatacctttgtatagaactttgtataggttctgtgagcagccacttggcaagatccactcccgccccaacattcatgcacagcctgtgtacactgataccgagaccacccacttacctttccttctaacgtattaacactacgtgctttctgaaaacttaactgcagaggcgtggacagaagaggcaagaagaggatggaaaataaactccacacgactccacaagtcccaagctgaaagtgctaaagactagcttgccagtagagcataggactaacagcagcaaggctagagtttaatctttaccatcaaaaagaaatacatagataagaaaatcccatgtcggtgtaatttcatgggccgtggttctcagaatgttacacaagattccgagaactaaaatcaacacaatggcccaaaagcccccaagggatccatcaacaccagtgaattatagagtaacccccagcgaggacaccctggggagggtcggtcactaggttagaaatggtttctgtgtgtataaaggacagggacgtttttggacttcctggtgttaaacagagacagagtcctcaggctggtgcgatcctagtagaagctcagatagcctctctgagtctgctcagcgttgggtattaaaacaaaacaaaaacggtcatgtacagttgtgtaaacctttacacccagcactcgagaggcagaaagcaggccgatctcatgagtgtaaggccagcccggtctacagagcaagtttcagactctgttgcaaaacaacagaccagaaaaaaagatgaaagaaagaaaaggaaaagaacacactcttgtttaagatggctttgtacagcgttgactggttaaaatgaagctcttgagtgatggaagctctgtttctccacagttgccttccaggatctgtgtccatacggccatgggacagtccccagtcttcatgacacacgtgaaggtaggctctggcgcagtttatttttactgtcacattttataaaaatagataaatttctcatttattttataaatcatgctaattttagaatgccctgtagtatagtatgttatatctaaagaatgattttaatagtttatgagtcatataatatatatatatatatacacacacacacacgtgtgtgtgtgtgtgtatcatatgactatactgatacgtgaaatatctgtttttctgacaaaagaagtatgtatgttccattcatgttagttgtgtgcttagtagatgtggatatattagcatatcattctatatgagtgagctcatgggagtgtcctattttagatgtcaatgagtgtcttgagagcccaggcatttgctcaaatggtcagtgcatcaacactgatggatctttccgatgtgagtgtccaatgggctacaacctggattacactggagtccggtgtgtgggtgagtattggctctgtttcccatagctccgacgccctgttgtattcttctgtctgcccaatggcccctcaggtagctccagtggtggtgggaagatttagaaaaccaggatgagctgataacagtatcttcgtctctcctaccttttcccatgcaacttgactcgttatgaagatggagtttcctagtatctgtctgtaaccaattatacaatctctaaagccttgggatgtagttcaatgataggttatatgtgctttgcatgcataaggccttagtttggtccctagcatttaaaacaagcaaacaagcaatgaatgaatgaataaatgaatggcaaagcctgggtaggagaataactaggagaactgtctgttttgtctttgcatccttcttgaagcagatgtccacagacatcctctggcttcgggactgttgcagaaagcattaccatctgggactgagagccttgcaaagtggcccttctggtcactttatgcactgtataaaagctgaccagggccaaagggaaggtgctgggaaggggtgatgtgtcactatgccctcatcggatccttgaaatgtgtctgggcctctgcacggcttcctctgttttgcagacaccgacgagtgctccatcggcaacccctgcgggaacgggacgtgcaccaacgtgatcgggagcttcgaatgcacctgcaatgaaggctttgagccggggcccatgatgaactgcgaaggcaagtcctcctgccttgaggctcgactctctcttcctttgagaatacagaattcctttttgaaaattgcctccacctttagtcactgtgttattctcctgttcatactcatgccacgtaatttccctcacctcgttgagcagttccaagggttcttctacaccctggtctcctgacagcatcccctgagtggctcggggacggccttcatcattttccctttctttaagactatgttatgttttctatattttcgtggcttcccaatatattggttaacttttaatttatatactctggatattgggaaggatacatcgtggactcagttacattgcgttcatgccttttttttttccctatagcagagttaacttgtgtagacacagtcgcagcctgctcaggcctttgaaggctctggtttcagttctacctttggaacctacaggccagcttctctgggcttcgtcccaagcatacatagtacagtcagcagcctaggctgtgtacacagaaagaaaaaagtccacccctctctttcctggtgctcctttccagaacctcactcactctggagcaccatggtgacctcaggattgtgtcccctgcacagaatattaggaagtttagatttagctaccaggctgccacgggcaggctactggtcatccttagggcggatcgggagaaggaaagagggagggtgaggtcaacaaatcgttaatgttagtccttgtagtttcctagctctgaatttttactcatcatcagcactccaggtagcttttgtaattcttcagcatatagctgttagcttcctggaagacagttttgccaggttctgtattgtatgtaccagaagcaaaagtcctggtacctcgttgcttcctatatgatctgtgagaaagcacattagtgtctctttcaagaaataactaagaaggcgagatgtcctgagtctctcacgctgaacgcgtgcccatttctttggccagacatcaacgagtgtgcccagaacccgctgctctgcgctttccgctgcatgaacacttttggatcttacgagtgcacgtgcccagttggctacgccctcagggaagaccaaaagatgtgtaaaggtaaggaaggccacagtcagggggtgagcggcagcttgacctgcctcctcctgcaccccttgacctctctggggcacctttgtcagagtgttacaggggggaaagggggtggagggggtgtcagctttgctgtagacttcctctcctagataacaggacacttaaaagtctgtgggtaagatggctcgagcatcccgttgctgtcacgtgcccaggcccttattacagcaaaagtcaccctcccctgacctcattctaaggaccagtcctgaaagtgttatacatctgggctgggcgtctttgtccctctgtcacaccagatgacaacatgacaagagtcagaagtacgactggagaattgctaacacctagcccgagaaacagaatgtgctgtttgtaaccgtttcccccttctgatgcatctttaatcaatgctctctagatctggacgagtgtgccgaggggctgcacgactgcgagtctagaggcatgatgtgcaagaacctgatcggcaccttcatgtgcatctgccccccaggcatggcccgcaggcccgatggcgagggctgtgtaggtaagttcccaagggagggtctctgagcaaggctgtcgctccaagccagatgtaacactgatcccagaggagctaaacctgagacggctccattccccgctgtactgaggctagccttcatgatctccacgtccagggtagcactcaaggctctggatcatgtggggcggaggggggggagggttcacgctgctggaaactgtgggggtgtcgttatttgtgagcctctgtgatttgtgtaagcatcaaactcagatgtgtagaaactgtccacgaagtacctctacccgtgcagccaaatgaaagtttaaggctaacagtctcaccttggtgtcctcaccttggtgtcctcaccttggtgaggggagtagataaggagcaacccagcattactattctcttaccccatcacctaacacatctgagtttcaatgcactcattgttaaagagatgaggtaaagctattacttcatggcccgtgccagtctggcctccctcacgccagcgtgtcagggctaccgtagccattgtctgtgtccttctttcctaaaacgctgtctgttacctgagccactgcagcccactgtatgggcttcctcctccctaagaacaggggctgtttaacttagaacctgttactcccctgccaacctccaccacctagggaaactgaggtctttttgtttttttaaagaaacaacagtcattaataatttcctgtttcttccaaaatgaatgccaaaataaaaaataagatttcttaaaaatgaatctcctccacacagttgcctgctacccaaagttagaacagggaggggctgcaagtggacaccagggatgcccattagggatgggaacgctaagattacactgtagcgacagttgtgcaagcctataattgaccaaaaaccattgaattgcacacttacaaattctatggcatacaaattataccttggtaaagctcattttgcaaaaatgaagccacgacaggaaaagagatacagggcatacagcgttacgctgtttgttctaacaaaaaaataataagggaatgaaaccaaaatacccattatagacacgtagatagatgcatagtggtatgtgtatgctagaaaatatacatagctgttaaaatgagtatggcaaatgtatatgcatccggatacggaaatagccgtgaacgtggagcaaagccatgtaaaataacatgtcattttgtaagaaactgcaagtaatatcatgtttcctgtagggtacatagggaagcatgtagaagacataggaaacgctttaaaaagagaaatcatgggtcacccccagagtgaaccaccgagaaagatacctcaattagaggttattcatctagagtggtttttacctttatctgacaattttgatctttggcaggactgaatttctaaagaacatgtatagatagcatagaccttaaaaatgcagcacccgattaaattctgcctaaaattccaacatagctaccctcttcctcctaacttactgcctgagatagcatatgaagaacaaaggttgtttgggttcatggctacacactgtctagtccgtgacccatgggcccatgcttcgaaattacaaccaggcctctcactgcaagagggagaacactcatccccaaaatgaaaacgctggagagaggctggggctggggtcccaccatccccttaggggacaagtctgcagggaccctgacaccctcctactatgccccatcttgaggtttcgccacttctcggtagcgccatctggtggccagccttcagcataccagcctttaggatacgttcaatgttcacactaaggcattggagtgtattgtgacttaacaaactctgtttgataatggtcacttggttgttgttcttgtccttttttttttttttaagtgtcacgttaagagtttagttacaaagcggttgactcaaaaccactctccgtgtagtacctgtccatttttaagggctgcgcctaggctccaaaatcaaagcatacgctcccgttcctcaaatctggcacaaggcaaagttgtaacttgtgtgggaaggagggaagaaacaccctgattactgtgcctaaggcacatgtgatcccaggtgctggtgtcacaagctggagccgccgtggcaagcctcggggctcgcatcttttcttgtgtattttgatgatagaaggtacaggtctttaaaaagtttgtcaggtccccaagcctttctgttataaaatgctatgggcaaggccatggtgatctcacagttagaaattccacacaaataaacaagatcctataaaaataaagtgtgtgtaaaatttaggatggaaaataaagtcaatatgaacgatgcgcatgcagatgcctcagagtccaagaaaatctctcagagttgatattcataaaactgtaaaccatgacaagctaaggactctatgtaggacatagaagagcccccatcaagaaaacagtaaagttatccagaggagtaaacttgatcctgccctatattgtagtcaaacaatcacttcttgaacaaatcacaacaaaatctaatcattaggaaaaaaaacacatcgatttgattaaatttggtcaaaaatgcatttataggcatctgaggttgtaatttagaagaaggcggtgtttattttaaagatggcatagagagatgtcctcctcaaccttgaagattttagaaatgtcacgggaagggatgagtcctggactatcctgccttaaagacccagccacagcagacagtgatgggcgtcctctaaacggcgtgtgcggttccaaccacagcgcagcggtttggtggcctgttgtccttcagactttatctagctatttccgttttcagaagtttgctcagaagatggtagacgagagacacgggagtacttctgggcaggcccattgtccccctacagtccccagaaagggagttgtgggaggtggcttggcacggtgctgtttgaatatagacaaacaggtccagacatggacattcctagattgagaccgaaaggtcggggacgaagcggtcaccagagagcctaaggcttagtgaccatctgatttagtataatgacccagggacagaaggcatggcaggtttattgaagatgttcatatattgagtccataggttccactttacgctattgacctgctgggttcctttcccagcaagactgaacagtttacacaaatatgtgcgtaatgcaggccgaacagaggggaagacaggaaggaagataagaagtggactggagacaactggaagaaaagggtgatttagaaaagtcactttaaccatctcttgaggaagataattaaagactcctgcgtggttttaaagttaccaatgtaatgatagaagctcagaagagaaatgggcccgcaggagagtttagaaacctctttagaagtaatggagtagaaacggggaagggggaggggtgctggagaggtggcccggtcaataaaggtgacgggcatacggtgcaggcatgaggacctgagtccaacccacaacacccaaacaaaatctgggttcagcagtgagcacctggcatcctagccttggagaagtgaaaagtctgatttctgggacttgctggctagccagactagccaaatgatgaaaaccgggtctagggagagaccctgactctcaaaaaataaagcaaactgaagcacaaaagaggaagatacccatggtaacgccaacctccatgcgcacctgcacacacatgcacatacgcacatctgcatgcatgcatgcatgcatgtgcacacactcacatgatagaaatgacagaaaagatgactagaaatgtgggtatagaacggatcagtaaaatgatacaaatggaagacaggtgtccacaatgtgcttacaaatataatcccttcaggaaaagacaaaagaaagctaagcagataaaaggtagtggagtgtatgagtattttagagaagttcttagggaaaagacttaaatctccatcaaaaggaaaagagacagacggacatggtcatgccctatagtggtaactacgccttttaaggaaaataaggttttgcaattgggcaggagatacttaagagagcaccttgggatctaatgaagcgacccctggacgctacaacatagactggaaaaataaagaaatgttgttaataatgccgttcctataaggagtctgtccgttgtaaggaggaagaagcagaagaagtgaggtcatttaggtggctatttaaaatcatctagactggggccatggtgatctgtggacagatctaggaaaaaaaaaaaaaaaacaataaacgaatcaacttctgggattgctgatggctgattaacaggatagaggaagggaaaaaaagtataaaagatgagaaggattgttaattgagtgagttgattggatggtgttactgtaaatatctatggaaaagactagaaaaagcagagtaatgggcatgaaaagagcagtagttggtggtccatgtgtgcagaaattgtccaaagagagatggtagatgctgagaatcaagatgtcctggatggtgtagctccacactgaggcacaccctatgaaggctacagatgttagcagcagtggagaatctggctttttgcaaacaaaacaaacaaacaaacaacaaaaactcattgccagcggcagaagagtaaaagttggagcacgtcaagttgccattcaaaggatcagaccttatgttaggcggttcatgcagccaaagctttgttggagagttgtttccaactgctagattataaattaatataagtatattaagcagggcagtggccatgcacgcctttaatccaagcacttgggaggctgagacaggtggatttctgagttcaaggccagcctggtctacagagcaagctctgggatatatgctgtatgtatctggatggatggatgcatggatggatggatgggtgggtgggtggatggatggatggatggatggatggatgggtggatggatggatggatggatggatggatggatggatggatgggtggatggacggacggacggatgggtggagagagagggagcacaccatttgagagagactcagatctaggagtagccaaactgagccctcagattctagaaacaaccaactagaaaactcgaaattcacaatctagctcattatttttgtgagtacccttaaaatttcataataaagttttccccccacaaaccagaaaatctatggattcacatcattatgaatttcagaatactaaaagcaaaatgaaaatacttaacacttttagagggggagggaggatagattcccttcaaataaacaaaaatacagggtaaatgaaatagcagattatcttcaatatttctaagggaaacaattttgaacttaaaatttcaaacttagtagtgtgtaaggccaatcaaagtaaggcattgtcaaaagcctatttggtaatttattttatattcacatgacctctctgaactaattaacaaactatatatttgaatttgaatccaagagtcagtgattacatatgtatagccacaccttagtcccaccagcatacaagttactagctaaagacgtttaaacagatggtgtgaaataaagagatggggcaggacctgaggaggctgaggtaagaggaaggcaacctcaactgcatcctagatgacacaggactagcttcaaaatgaaaaaaagcctagagacaaaagcccagtgggtaagcacttgcctagtgtgtgtaaggtactagattcaatgcatagtctcaaaaaattataatttttgaccctggttgagaattcagtaaaagaacatttcaaaaccatttaaaggatgctaccagaagagtggagagaaagtggtagtagccaaacctgagttggagacacgaggaaaggacaggaaattagattggcttgacagatgttaagagaagggggaacatcaccctaaacgtgaaacgtatgaagtggcaggtaagcttggaatagcaatcgtgcactggatcacagatacacacactttcaaagttcttttgaggaccagctggatgcttctgtaagaaacacaccaagacaaaggggtgagaggatggtgtgaaataaagagatgaggaaagacagtccaggcatctgttagtaaaaagacaacgcaaaaggatgtcagaacactgaagactaaacaaggaaggaaggaaggaaggnnnnnnnnnnnnnnnnnnnnnnnnnnnnnnnnnnnnnnnnnnnnnnnnnnnnnnnnnnnnnnnnnnnnnnnnnnnnnnnnnnnnnnnnnnnnnnnnnnnnnnnnnnnnnnnnnnnnnnnnnnnnnnnnnnnnnnnnnnnnnnnnnnnnnnnnnnnnnnnnnnnnnnnnnnnnnnnnnnnnnnnnnnnnnnnnnnnnnnnnnnnnnnnnnnnnnnnnnnnnnnnnnnnnnnnnnnnnnnnnnnnnnnnnnnnnnnnnnnnnnnnnnnnnnnnnnnnnnnnnnnnnnnnnnnnnnnnnnnnnnnnnnnnnnnnnnnnnnnnnnnnnnnnnnnnnnnnnnnnnnnnnnnnnnnnnnnnnnnnnnnnnnnnnnnnnnnnnnnnnnnnnnnnnnnnnnnnnnnnnnnnnnnnnnnnnnnnnnnnnnnnnnnnnnnnnnnnnnnnnnnnnnnnnnnnnnnnnnnnnnnnnnnnnnnnnnnnnnnnnnnnnnttgtttgtttgtttttaacttgttacttatttgtcaccaagcaaaagagtgccactgcctaaattctcctccctgttaatcacctttagaggccacagctgcacccgggatcccacgcaaagccttcttccctggtccccaccacctcagtggaccatctctcttcccacagctgtttcctcccctttcagaagctggccccctctttcatggaatgcttcctctctgggggagtatctcgatgtccacaaggacactatccctctcctacaggggctgggtcaagaaggaaactttcagaaaggagtcatctgattggatgaggtgcactgggagcactggtcatgtgaccgatttaatcccacctcctcagtttttttgtttttgtttttttttctgagacagggtttctctgtatagccctggctgtcctggatctcactctggcctcgaactcagaaacccgcctgcctctgcctcccaagtgctgggattaaaggcataacgccaccactgccttggtatcttgtcaaaggcttttaaatacgatgagaacaccgaaagacagttaggaagctgtggttttaaagctgctcgtaatttttttttttcctatgaagatgagaacgaatgcaggactaagccaggcatctgtgaaaatggacgctgcgttaacatcattgggagctacaggtgtgagtgcaatgagggattccagtcgagttcctccggcactgaatgcctcggtaagtgaacacatgactatttccctgggtgagtatagcacgtctatgacgtcatcgcagaacagctcggcgcattcacccttgtctattgaacagaccttgtacaaggccagtactccacacgccccgcccccgcccacagatacccatctattaaaatgatgtatctctatgcctacgccttacacgcccatgtaacaacctgaaacagtctttccaaaggggagattagttaagctctgtggaaaatgtgacttcagtaaggctgacatcaggagctgatttaattccaaaaaaagaaaatattttcagtgtgaggtaagctcccccaatactaatgcaaagcaaacgccgcacgtctccaaagcgcagcaggggttaatttttacattccagtccagaaaaataatttctaattggaaatatgacctcatgggcactgtagcacgctgaaccgatgctgaaatgtatacactgtagtgggtgctgttaatgacgggcagctgtaaacgtagggtgtggtcaacttaaaaggaaccgaagaaagaggagagatcaactggtaggtggcccggtcgggccaagcatcagatgctcatcagctcatcagcctgctgctttcattcctagggatatttttatacccaacaatctattttattacctgttgtctccgatctaggtctttcccagacgtatgtctttaaagacactactttctgctcatattatggtcttactaggacagttggcttatgagaccatgctgaaggcttttctccatgattgcatcacagaaggctctgtacttatattaatctgctatctacaatgcaccaagtcctctccctgtagacagtaacagcataactaccacgctcgtaacatagtcttaaatttattcttcatttccctacctagcatcactttgtctaacaggaaaaaacttctgatgtttcttcctcttgggttttctgggactatagctcctaacttgcctatcactttcattgaattaaaaagaatataattctatttctattgaataactcattcaattttccattgaataacttttgtcaagtttaatactctattcctagtataaacaccatgggggagggggtgtattgtcaacaagcaatcgctaagcatcggccactcacgcaagaacactctgagttttgaaggttttgcctagaaggagagcatgatggtccactgaaaaccaagctgactggtacccggtcttgactctcatcttgtgttccgctccagacaaccgccagggtctgtgcttcgccgaggtactgcagacaatgtgtcagatggcctccagtagccgcaacctcgtcacaaagtcggagtgctgctgtgacggtggccgaggctggggccaccagtgtgagctgtgcccacttccaggaaccgcccagtacaaaaagatatgtcctcacggcccaggatacgccactgatggaagaggtaatgcgctgaggggacttgagacgtcatatcagaccagttgatttcgtacatccaaattaatgtaaaagaaatgtaagaggctaattctttcaaaattctgcctgaaagtctggtactctatgcacgaatcaaaagaatattcttatattcttgcctaatactgtatacaggggtgtgtgtgtgtgtgtgtgtgtgtgtgtgtgtgtgttgcacacatgtgtacgcacttgtgtacacatgtgcacgtggaggccagaggaactctccaagtaggccaggctggcccgactatgcaccttagggatttggctgttttcatctatctcaccacccctggccttttaaaatgcagggtctggggctctaactcacatcctcaagcttgcaaggcgagagctttacccagagttatctccccaggccatgttccacaaagagatctattcctatgtcaaacccaagggagactttactgctctcacttaacagaggcggaaacggaagcacaaacctatggtaacaataaataatgtcccggaaaacgtgggcaaaccctatctgaccccaaaggccttgggcactaataacctccaaactgcacttgccttgtttgaagaaacggtgcacagctgagtgtgggtaggaattcattctgttttcaagctacttccacgctagcaggtttcatgattagctagaggtttccacttttctgtgtgtatgcatccaagtgttttgtggatgttatgaaagataaactggttccctccattgctgtaaagactcccagccagtacctgactgctaactgaagccttccttcagagtctcaaggcaggtgggacctggaggcccagatttatggatagtaagttatcacatatttcaagcggcatctttctaacacgtaccaaaaatggtaactcccacttagaatacaaaatgaagagtccggcatgagccttccggcatagccctctcgtggttttcttcccgtgtctctctctccctgcctcctcagatgcctctgtttccctcccagattgcccttccctgagaagtgaaaagggactttcccagaacttccctggtcgttccacctcaccccttccgacatcctcctcccgtccagctgcctccactgcgcacacattagcttctctcctcttgctctacagatatcgatgaatgtaaggtgatgccaagcctctgcactaatggccagtgcgtcaacaccatgggctccttccggtgcttctgcaaagttggctacaccacggacatcagcggaacagcttgtgtaggtaagatgtggctgtacacccggggtttggcaactcctgctgcctacagaccgagcaccgtcaggggagcactggcctatgcctcctacagaccgagcaccttcaggggagcactgagctatgcttcctacagaccgagcactgtcaggggagcactgacctatgcttcctacagaccgagcacattcaggggagcacaggccttttcagctttcactatgctgaccggaagtctcagtaatgatcctcttaatgacagagctcttgtttggtttgtttgtttgcttgcttgattgattgcttaactgtgtgggacacggggtccaggtcatctcagattctgtgcagtgggggaaacataaaaatcaaaaaaaaaatgagttttcaatatgttcattttaatttaaaacttacaaacgcatatctatttggtaaagaaaaggaagtgggcttttcctgtggatccggtgtgtttgtgtgtgaagaagaattcatttttaataatgtctcatgaagtgcagcaactaagcatcatctaaaagctctgcttgcaaagaaatctcaccaaagcatcctctggctgtttacatgtatttctcttctttaattcataatcatctgatctgtgccattttctgacaaacagaaggctgtggtagagccttcttgtacactttcaaacagttcttatttctatttccccggctttatgagacaccctcttaaattaccaactttacaaaggttaagcaaaaccgaccaactccacaaaagcattttagtcacacagtagaaacagcagacaggggagtagccaggagtgggatccaaatcaggagtttctgcgtgcagcaggcctccgttcatcccgggagctctgtggaggaaatggagattgtctgccatcagtcacagtcctggcagtaaagagttggcatagcccagagaggacagacgaagtatagcttagcatcaagattgtgtcagtcggtggttctcaaccttcctgatgctgttgccctttaatagagcccctcatgttgtgctaaccccccgtgtcctccccccaccataaaattatttctctctatttccccataaaattattttcgttgctactccataactgtcatttttatagaggagcagcatctcagtttgtaagacagtctgaaatgttatttcccaatggtggcgaccatcgtaaggttgagacccgacccgctgctgtaagtggacagcggggtgtagagatgccacaaagcaggggttcaccagagcttatgtaactccactctggggccaaacaaaaggaacagaggggaacgtggtgagaccctgagagaacagagtgtgcagagagcatctgtgagaagctgccgcaggaagccactgtctcagcataaacccacgccagagagacaagaggaaatgggagtgttcctaaggtctagtctagcctgattaagttgaagagcttcttgagtttggatttttttttttttttgagcctagacagtcgtctagacattacaagatctagccaagatctgtgcattgatcctcgaaatacgccagtctgctactttagagaaaactgttcttgctggatgaattcactgtatgttgtagagggaaagcaagaaggacggagtgagaatgtggggaggatggagaggctggtcctttctggtaaccaggactctcatgttgctctttcctctacttagacctcgatgaatgttcgcagtctccaaagccatgcaacttcatctgcaagaacaccaagggcagttaccagtgctcctgcccacgggggtacgtcctgcaggaggacggaaagacgtgcaaaggtgaggggagtctcagcagccactgcccatctttctctctctcttcaggaacgtttgcatattagccttgttaaagtgctgctccgggaaactttaccagggctcctattctagaagaaatggggacttaaaaatctaaattaaaatatgttgctccttagaaatgaaaagaaataaagtctgcacatatgcacacacacagacacacatagacacacacagacacacacacacacatacacacagacagacacacatacaccacacacacacattcacacacacacagacttacaccacacaccacacacacacacacacnnnnnnnnnnnnnnnnnnnnnnnnnnnnnnnnnnnnnnnnnnnnnnnnnnnnnnnnnnnnnnnnnnnnnnnnnnnnnnnnnnnnnnnnnnnnnnnnnnnnnnnnnnnnnnnnnnnnnnnnnnnnnnnnnnnnnnnnnnnnnnnnnnnnnnnnnnnnnnnnnnnnnnnnacacacacacacacacacacacacacacacacacaaaggactattttttttttagccaaggacctcaaatttacttcaaaggaaagtggttggaactgcttgtcatcacattaagcaaaataagccagcctctggaatgcaagcatcctgttttctgacatatacacaatctagactttcttttaggagtattaaaatgtcataatgaaacccacgacttcgtatgctatcctaaatattttttaaaataaaatttaaaaagaagtctgccatgaaagtgcagaactcttttggggaggtggtcatgggagagagggtgaaacaagacgagataatggggtggtaaatttgagcaagtcacacatttataaaataataccataaccccccccccattcatttggtaacttttaaaaaacatggatgcaagagttggtaagaaccgtcaggacctggagttctggtagctgccaacctcaggccccacctcaggcctacgcgcatccgcgtttactgcagacaggtgaggagtcggagtgtatgcgttaatttgtgcacacacacttattaaaaacaattagcatgccaggtctgatcactaacatggcttcagtgctgtgtttgattttataggaacccaatggtccgaacagacagtttaactgtgttctctgtgaagcaacattttctttccaagctatatttaaaaatcataacaataattacacacacaaaaaaaaaagtagcaagtgctgggattttcttgaacctgttcaaggaaatggttcggcagagctgactttttctgcccagtgtctgtaaaatgcttggaactcatacttccactgtacatgggacttactttgaatgtattttcccaaattaagttttactcaaatcaaaatcagattttgaagagtccagatattcactctaagtttatagttgttctggtcttgcttgtggggggcagggggggtgtgtgtttgttgtttttaagacgggtttctctgtgtagccttgtctgtcctggaacccactctgtaaaccaggttggccttaaactcacagaaatcctcctgcctccgcctctgcctcccatgtgccactcctgcctggcaggagctgtggttttgcttcttctcttataagtaatggtgtgcctgcccatttggatctggtaaccctccctccatttccaatctctgctgtgcttttatttaatattccctttaataagaatatgtaactatctatgtaccaaaccacattaactacaagatgggacaacttttccatgttacctttgcaaagggtggacctgctgtgttttagccatccagtttcttgttttaagacaattttgccctataatcctttagccacgctgtcccaattagcagccttctatacttaggctgctaaatatgtacattcaaaccctccctcatacacatatgggaacctacagactgcagctgaagtttaaacccaatccctcccacccccggaaaaatgcatgacttctcctgggcttctctgtcatttcagacctcgacgaatgtcaaaccaaacagcacaactgccagttcctctgtgtcaacaccctggggggattcacctgtaaatgtccgcccggtttcacccagcatcacacggcttgcatcggtaaggcaaatcgcagtcaggatctttgacagacggctcaatctggcctaaggatacagatgtttgctgaccagaacagcatccaccaggaagaaggcctggacatgcgtttgcacacacagtggccacactgtacggtgtctcggcatcccatcctcagtacagttgttagatcatggaagaagtcctgccatgcagctgtacagcaggcatattttaaaccatacttcagtgtcacaagccaaacacagctatgatgctcagatacaatacgattaaaggctgtcctggaacttctcaattttattacagaaggcacatttcaagagatccttagtctgtattatctaaaatggtgcctctagtaactctaaaatacattctagttacaagtcactgaaaaacccacgctatgctgctcttgctaataaattctgatctgacttaaaatgcttgccccaccaagtgaaaacatgggcttgtgcccctcagtttatttcatggagtgagatttaattgacagaccacataaccagggagcttgactctttccctctgtctcatggctttgctagataacaatgaatgtgggtctcagccttccctctgtggtgcaaaggggatctgtcagaacactcctgggagcttcagctgcgaatgccaaagagggttctctctggatgcctctgggctgaactgtgaaggtgagtccacgtgcacagggagcctgggtgtgggggcttcagaaatggttccataaagcatgggccattcaagcctgagctcagatcccagtacccaggtaaatgccaagtggtcgtgggacctcttctgtaatccccatgccctggaggcaggattggaatctgtgcagcaggcaggatagctacactagaggaatccgcacggtctgggtttagcaaaagaccctgtcttaatatacaaggtatagcacaatacaggaacacatacacaggcacacacacacacacacacacacacccctccctgcgtatccacatttacccatgcacaaaagaacatgcatatgcatacacaccacatacatatacacagacaaaaataatatttagactctgcacccatggtgcctcccacacaataggtatttttctcttaggaaatccaaaggaacagctgatggggagaaaaataagaaaactatcacatgggggtcttcagtgtttacgtggcacgtgctgacgtcacattcaggaaggcaacgttagcgttgtatgtctcggattctgacaccagccacatcacctttatgcttttgcattgtgttatagtttatattgtcctgttatccttttttaaaagttattcctagaaatagaatggttttccattctagatacaatcaaaatgtgaaatatgctctttgtacgagttataggacttttacatgcattttcagccctttttatttaaaacttttaatttttttgtatctgaaatcaatagacatcgaagcattctgagcctacagctgcttgccatgtgtgaattcagctcgtgaccatccacataaaataccatttattaattatccatgtaaatttgttacacacacatcagacatgccaattttatttcactcttttggggtagatttcaaagccttagttgtcattccaaaagtgtatgcatatattaacaaagaaattattccatatgtcgtaccacatcttgcctaaaaataacaacgaattcaaatactttaaagggatttgcatctaattagtcttgactgacaataaaaaaatatttgcgtgcaaagccattatattttacagataactccttagtgcttatatcttctccgcaatggggattacacatgaatcacttttgaatcaactacaatcgttaatacataatttaccaaataaatcataccacatggagctagtcaattcaaatgtaccacatttgtggcgactattgttgatttgctgaaactaagctgtgactcggagccctggtgtgctgtggttgctgggacagcataagaataaggtgatttcttatctcagccattcattccttgcaccatcactgactcagaaccgtgctgaagaaaagcccagtccctccataagctgtgcgttgtttatttgttcccattaaaggttgtgtttgagatgtgttcaccaagggagtgtgcagagtgtacgggggttgtttttgcagatgtcgatgagtgtgatgggaatcacaggtgccaacacggctgccagaatatcctgggaggctatcggtgcggctgcccgcagggctacgtccagcactaccagtggaaccagtgtgttggtgagcattccttggtggcccagcccttggcttttctcaacctcagtgtctggataagctaaataatagatgttacagttgcaggacagactcctaaaacctaaaagccagtttaaccatgtaaggttattgtgtgagagggctagggttagctcaggggaagagcacttgcctggcatgtgtaaggtccagggttctatcccacctctacgcactgttaaaagggcagacaggaaaagtctgcataaaagcattgatacacaaccgggattttattgtgctcatctctgtatttgtgcatgtaacaaaatctatcataaacatgtttttggaatatttaacggcacatcaactagaggtgtcgtcattttgacttttgatgtactgtgaggttggggctggtctcaaaaccatgctctgctgcttttcaatactaatttgttagatttagttcacggaagtgttcacccattaccctggtctaactctaaagggccctttccatccttttgtgacagggcctcctgtctataacttgctatgtagccccaggctatcctagatcctgccacctctactcccccagggcaaggacttcagacatacattaccgtgcctggctaggaattctaagtccccaagaatggtccttccgtcctcacgtatcacatagacttaatgagtattgcaaagttgctttaacatagaaaaagtaactagtcggaataaatgctgctgacaactccagacaaaaatgtgtataaaagaaagcacaacaggaattctgttctgttctctgcactgatagtaatcacggaagtgctccccataagaaacccctgatcaaagagaccgttattcttcctgagtagcctgactgaggctatacccaatttcgtagctctatttgaacacactccatagctgccctgtccaacacattgtgagagtagaagcttgcattgcccaacaggagagcagcagacccccttccccaaccctacaccagagagcagcagactgcttccttgtctctgaagtgaagatactacacacgccattcaaatgtgccgtaatgatccaccaaacgaatggattctatatgatcttttatgttcctctcaaaagaattttctaatggcagcttaatgagctgagaagaaaaccaaaggttttgtaagagaaatgaggtccataaagttcttcttatctgctctgtggcctcctgccaggccaggggccgatgcttcgccacagcagatctgcacatctgtgatgggaggagaggcagacagcctgtgattcagagcaaggcctgatgactacgtgtggggacgtgtcaccaatgaaacccattgttttgcacactggctaaaaatgataaaaaaataattttaaaaacgtgcagctagcaaagaaagataaggctaaagctttaaacgattatcaaagcgttgagttaaacagccaatcaaacgattgtataaatataattcacttctttcttttttcttaatggaaaaaaaaatgttgtggaattccttaagccctgatatattcatatactgaagccatgtgctgtcaagccctttaaactatagaaagtagtgctttgactattaaagatgatgtagaattttattttattttatttatttattttgtatttatatgagtacactgcagttatcttcagacacacactagaagatcccattacagatggttgtgagccaccatgtggttgctgggaatagaactcaggacctctggaagagcagtcagtgctcttaaccgctgagccatctctccagcccaatgtagaactttattatattacggtgtttgtaaactctccaggcccatcatttaagtaaggactgcaggcttcatggttagttttgtagaacttaaggcagaatgagtctctagtagtcagtttacacagaattcttggcttcaatgagaactcaaagagaaattagaacacatagaagtcaccagttcaagtttttacacttcttaaagttttgatccgtaaacaatgcagtgcaaaaccatctgcgtgagcctttagtaactttgaggtttctgttgaggaatggcctgtgtgcagcttgaagaggtgcggtaccatcccagtttcctttccacgagttcatgagttaagtgctttatttagcctagacctccagagtccagacccaggcctgcgagtctcctaatcagagaagcaccttgagcagagccaatagtgttttcaaggatgaggcgtggtagcatttacctgccatggcagcatccacagactgaagcatgaggatccaaaggcctgtgagacccattctcaaaaaaaacaaaaaaaaaaccaaaaacccactggtcaatgaaaggaactagaagcatgtaagcaggtctgccccacttgcaagagttagcttttctttcttaaaatgctcatctttaggcagtcactccttggatagacagagacagaattgcaaagattctggatccctcagggtttctgctcactcacgtctgataaaatggacactgttcttgcttttaagccacatcccatgacaaatggaattgtagatgtggcagaaaaagagtgaactttaccccagccgggaagctaatgaatgcatcaaattagaatgataagaattaggaccaagctcaggttatctgcgtctgttcatgtaaatgccctgcgactggagggaggggagagagcgtgagggctttcatgtagtcttctcctctggtgaaccatcgaaggtgtccgtcagaacagcagactccctcaagtagacaaactccaaagttcacgccgctcttcgtggtaccacccattcaagatgagtaagcagtctctgaaagtgatcattttggagaaagctctccctacgaattcccaccttgtaagttttcagctcattaccgcagggacttgagagagcatcctaggacacagactatctggatgcaagtagggttctcgactaccagcacgtattgtgatcgtttgaaattgaaaacgggcagcagatatgaacatttgcatataaagaaaatgtttcaatatgcaaatttttttgccatttactgcagataactttcagttctttctgtattataagctttcccaatacaatcccaacatagccaaacaaggcatttcaattcacagtacatctcaaacaagcccatacttaactaaattcctacaatgttaccatgttatatatttatagcatataagtatgagaacgcttagtacttccagaaacataatcctgttttaaaatgttcttgtaaatggaatatttaaattcaatttactcaattaattggctttcttggtaatttttctgacttacacaatgcctgagtaaagtcacgttgggaacatgccattaagtttgtaatctaatttagattccatgttagaagagaaatactacatattaatgtgagaactaattatgaaagtggatgaagctttagggcagaatttcaagtctctcaaatatagaaataaaacagtgggtacattcagatcccacatagccaacctactgagaatttatgcatcttctgtgcataaaataaatgccaggagatttcgcatattaagcaaatgaccatattttatattcagtggctaagagttcttcatttacttctcatttaattctccaactgtacacattaaaatatgcctaatacctgcgctttcggtagcttctatcctgtgctttgcaaagttcagtctcccgtctagagtcctctgctgggtcccaactccatcagggaaatctccctgagcggccgcgggtccccacacccacacccaggaatcactgtgttccccgggtatgcacactcacagatgggcctgctcgcatccaggcagacacatgtccacagacattccacatgcagtcgcaggagtggaaagagttccacggaacagatgtgattcgtgcccagcatgaagtgtgggttataataaagttcagaggagtcaaacccagggctagctcatcaaccaaacagttagaagcaacctcataattcccaaagccagaagcaccttggggccttgaacctgtgataacagcagctggaagcagacctgtaattacgctcctgccaggcttctgaggacagagctaagcacttagcagtgagagctctgtgtcagtgctggcggggagggcattgtctgcaccaggcaggctctggagcagttaaaaccactcttagttcaatagagtcagttagggtcctttcctgaatttctcagggactccctcccctatctatatacatgaagagctgggggaagtgctaagggccaatgggcacaaatgctgatagagagatgggctcttttaaaaattcacatagttcatgtacagtaaaattcacccttttgcagtgccagttgaaagtgtttcggtgtgttcttctaggtgtatataagtatcaaccccaatagtcaatgcccctgtcctcctgcaatagaacccccataactgatagccactaagccactatcccctcttcctccctcccccttcccctggaaactgccaatctgttctctctctctctctctctctctctctctctctctttctcttgcctaaaatacagacttttgaaataagcttttgttaagagaataagagaatcaggcagtggtggcacacccttacctttaatcccagcacttggaaggcagaggcaggcggatttttgagtttaaggcccccttcatcccctctgcccctgcccctccccttggtaagatcttctttcttttcctttttgaacagatgagaatgaatgttccaacccaggtgcctgtggctccgcctcctgctacaacaccctggggagttacaagtgcgcctgcccctccgggttctccttcgaccagttctccagcgcctgccatgatgtgaatgagtgttcctcctccaagaacccatgcagctacggctgctccaacacagaaggcggctacctctgcggctgcccaccagggtacttcagagtgggacaggggtaagacattgtccccaaaagcatcgaggaggacgggtgactcttcctctctcctgagcggtcagggtcaggcagccttgcttcccacccctgcaagggtgaaactggaacccctgtgtgtgaagtccaagagggggatagcattgggacataggcgccatgcagggtaggagcacttcctttgtggagagcctgagaggtttgcttccatggaagcttcagtccttggtccttataatagctgaagttggttcctcttgactcaaggccagatgcagggcttaggcagctcctgtgttactgtgagtgacagatgtgtgaatgacgtcctccactgcatcactctgctgatttccacagatgctgacccagcaacccctgaggaaggactttgcctctttctctgttcatctggtcttatgttgcccagaaagggatcagtccttcccccacaaggcttgctaccccttgggtaactgcactttggcagatcttacnnnnnnnnnnnnnnnnnnnnctgctctcctcagggacacagaagtttacaagtaaataggggtgatcttcttcgaaaggattagcaagtctggcaggcactaaggggcatgaaccagtctgtccagcactgatatacagtcacacataacagaaaagattgggcttagcaaggctcgctttagagccagtgcattgctgccttctgccgactaaaacaggaatgcagaaataccaagttctagagcagagatctttgcctgtgcggtaaaactggcttcaggctcctctgggcttccatagctgcttttacctccttaagtagactgctttcaagtgcttcaatctaaataggattgagagctggggaagcccaggactcgtcctcagaagaatctcgcagtttcaaaacaagaggaaatctttcccactgtgtggcaaagaacagaaccacaaagatcaggttttgtgattaatgcagttcctcgtgttgtgctgagcccaaccataaaataatttccgttgctatctcatgactgtaattgtgctactctgggggaatcataacataaatatctgtattgtcccatggtctcaggctgacccgaggggttgcgacccacaggatgagaagagctgctagctggtttatagcttcttcctatgcgtccatgtttcctaaagacttttagactgcccgtgctaatggtaatgtctaagaatttttttgcatctcgtaaacagccactgtgtctcgggaatgggcttcaacaaaggacagtacctgtcggtggatgcggaggcagaggatgacgaaaacgctctgtccccagaagcatgctacgagtgcaaaatcaatggctacaccaagaaagatggccgacggaagaggagcgcgcaggagcctgagcccgcctcagccgtgagtagacacagagcagaagccctgctttgccaaagaaaagggaggaaagaaaaaaaggttacacacacacacacacacacacacacgtgttccttggccctgcccactgattgtctctgtctccctaggacatgtgcacctaacctctccctcagctccttcacctataaaatgaggattaaaactctcaacctctgaatgttgctgaacaggagcatgtgaagtgcttgcctcgatgcctgaagtgcacaccagtgattaataacccacatacaggcatcacataggcatataggcgtgttggtgatttcccctgagaccagggacactatgaggccaccacttacctctctttttagttactattactgagaattgctcctatcaatacacacacacacacacacacacacacacacacacacacacacaaactggctgtgcttcagtattctgggtctcaggaccctttcttatctataggaccacactaacttagccccaaaatctctgatactattttaaaattacaagtcaatgttacatgtgtttttaagtagactgaagtatccaacccgatatttaatcatgacaaatcgctcatcaagtcttcccgttgtggttcacagaacacgattctgtgtaaataatgatgggttcctcaaagcttctgtaaccataacctcacttaagcacaaacccatagcaaaacattatgggtttgtgtgtgtgtgtgtgtgtgtgtgtgtgtgtgtgtcctgtctcactaaggcagcagtcttacctcacatcccaaatgacaaattcggttcatattgtctgggccctgcttttaaccaatcctggctcactctgcagatggctccgagccttctgagtaagaaggctcctagaaaagtcacagcccagagatggtttccctgggggcaggctctgctgttgaatagcaataagacttctcgttttgaccccacaaaagagaaaattagactcgtttcttaaattgtccttttccattaaaatgtttgagaatttcatgcatgtataaaattattatcatattgatccccatttctccccctcgactccctgaagagagcccccccacaatacaacattagtcattgtcccactggatacaattagtggtacacatatacacactgtgtatgggaatatctactgaaacaaagacaaactaccagtggccacaacaccaaagagaagtgactatctctcaactttaaagttaatcttaatattgtataaatattactaaattgtataaacccatcaaaggaccctgatatgtgactattgtctgtggcctaagtcctataactttaatgatcttgtcgaggctgagtgagggtcaggaagattcacaggacatcccccgcagggtgaagcttttccccaccctgacaggaatttgtgaaagcctcttttgcagacagcaaatggccagacagggagcagcctcaacctgcctctgtgactatatcagtcaatcgcaggtggcctttgagtctgccttgtgcccgctaccaactcaagtgtgttcttgctctttccctcaggaggagcaaatcagcctggagagcgtagccatggacagcccagtcaacatgaagttcaacctctccggccttggctccaaggagcacatcctagaactggtccccgccattgagcccctcaacaaccacatccgttatgtcatctcgcaagggaacgaggatggcgtcttccgaatccaccaaaggaacgggctcagctacctgcacacggccaagaagaagctcgctcccggcacatacacactggaaatcaccagcatccccctctatgggaagaaggagctgaggaaattggaggagcacaatgaggacgactaccttctgggggtgctcggggaggctctccgaatgaggttgcagattcagttgtattagccctctgcagacttgggccttgggccccagctcagatcccagcacagccggccttcagaagtgtttggaacatcactgactgattttgaagaggaaaaaaaacaaaaacaaacaaacaaacaaacaaaaaaaaaaaaacaaagaaggccttctattcctttccttcttcctgattcagacttcggaatgttgaccctcgcagggaaggataatttagactctggtatggccaaagatttgagtgcaaaggcaaacatagttactgtattttttatataacttcatttttaaatatattaaaaaaaaaagcaaacctaaatgttcaagagatcagcgtatggcactaaatgcacaaaactaatgtgagccttcttcctgttagcagtctataacactttgggtattttgctatagttgctaattaaaaaaaatatagatgtttatttattttaatgcagtaatatatggagaaatgaacaaactatgtaaacaaaaagggaaactcgcttgtttttcttagatttataaatttgagctatttcttttagaggtgctttaaaaaaaaaatccaatacattcaagagatgttttcctttagtttttccgccagccctccaactggtgcgcacctgactatttcaaagaaagtcttgcggagctgaatgggcggtgtaatcagtaatttaaaaagatgtggaagtcgtttgatcctgtccaaaggaaatgaaagccagagcagctcctatgacaatatttcacatcagcagattcgccaggcaacaggagaggaaaccactgtagcaaaataccttgactgcttgtgagaccgttagcattgcaggccaaactgtactgtatttcttcctcgtaacctcaaggacccacacgtgcctcccacaacacctcattcttaccagggcgtgctgtgcacttgtggtcccctaggcagctgaagaacccgccgttcctttgagcaggaacacctggcgttctgtcgagtttggtgctgtcgtagattaaatggtgcatttattatgttcaagctatttcaggattgccatgtgtgcaaacaatcatgccatgcagccaaggaatatatgtcgatgtttttttttttaaacccatggtttttatttttattttattttttagaattttcattaatactgtagttatacaccatatgcctcattttatcatagcttattgtgtatgaaatatgtttgtaaaatgaattgatgtttagtttgctttagccatttgaaaagatgccacaccaggaggtaaccaataagagcacagctccacattcttctccctggagaacccgttcctggaagagtgatggaaaccggagatacaaaatggccaaagcacacaccgtcattcctctcgcacctgtgttgaccaaagagtagtaaccagttatagccaatgttttggggttttttgttttgttttgtttcgtttcgttttgtttgtttgtttttaataaccaaaaagaaaaagagaaacagtgtaaatttgtaatcaagtgtttgtgaggaaaaacgtatgggttttggttatgtttgtttttgtaggtctatgtatcaaatatgacacttttcttgcaataaagcttattttggggtagtcttacggctgcgtttcctgagactccaatggctggtccatttgtgggaggcactggagacttcgcttacagggatatttattaaagaacgagacagaaagggaggcatgaccacaggaaggtgaaaggatggtgtgccttatgcgacaaaggcagatggggcgtttgcttctagatctattcacagggggagtagaattagagcagtgggtgtttccaattctccatgaatcatgagtgtcccggggtccagttttccagaaattccactccttccaactgcacatttgcaggatgtcttattaaagcactcgaatcgtccataaggcacagaaagagcaaagtttcctgaatcgaaatcttgaagccaaagtgaactgcaggcatgtgtcaatataaatggcacatatccaaaggcaagccaaagcttgtctcctgccttgccatgcagtctactcttcgaagtaaatagatttagcagggtatttaatgtgaatcctctcttgatagattgctaaaatgggcgtgcacacacacacacacacacacacacacacacacacataggcatgcacacacacacacacactcacaccaaaaaagaaaaaaacaaacaaaactttccaagacttacaagttaattcaatccatggtaggatttatgtgtttaaaattttcatccaaggaataagagaacaagggaatattatgaccgatcttaattctgtcctttgccaaccagaaattagcttcgtggaataagaaaagtatttgccttggagtatcctttaaaacttaccatgcacatgcaacttcatctggtgtctattaatagtacagcttgagctctgcaatgtcaaatgacctggaaccggatttgactctagttctgaatatggagtgacaaggctcttactccacctttaatctcttcatgaggaagtctgaaagcctacaatgttgggagcttcgtgcagaacataaaaaaggcattgggcatgcaacaaagaagaacgctcaaagaaaatgactccaaaaagcttccacccaagtcagcactttatgagcatccacggctgctttatgacaagtgtaagttacgtcatcctatagctcaccacggaggatgttttaggcagcatgttgttattcacatttccattattttctcaaaagattcactcagcatatttttttttaatttacagaaaagtatgtcaactcaggaatctaaatcaaacccagtgactctatgtgatagtcacaatggtcttcaaatgacagcatctctctctctttctcactctcctctctttctctctctctctctctctctctctctctccctctctctctctctctctctctctctctcccctcactgtgatttagagctcttcagacctctgtcctgtttagttcttttccacgtttctgagacttacactgcatgggtgttagtcacgtttgaactctgaacatcattccgagaagcatgtaaactacaataaatccaaacatctactgctctgtgtgaacttaggactgggagccatactggtcactctgtccgttctctgaggccttacttggctttaattacctcctcggtaatttaacgtccatgatgttaaaagtgagacaacggaaaattctaaaacactggtgtgcctgagtctgtcaaaatgctagggaactataatcaatgtacggaatcgaaaggagtgaaaggcagccatgtttgacacagaaggtggcaatttagtgcgttcaacctgaccactcagcaaccttcctgtctttaagagtatgttagagataggaaagggccctgctcttcaggagactagaaaccccaccacaccgtgctacctgtggctggctcatctgcattcctgctttgcaggagcccagcagaggattacaccgcttattcaaccaaccacttccttgtctgctccagggcacacatctttgggactatgacgggttaattaggagctatttagacaagtttgttggaggaaaaaaaggaagaggacattttattaagaataaaggagtaattccagaaccttaagagaagtaatggtgaatggaaagatgggagcttactgctgcctcatgggaaataagattttcctatctggtgattgggttggttgttgggttttggctttttaagcatgctcattttctcaacatattcaaatccatgaatacttaacaagaagtatgcttttctgactatctttgaaaaccatctccttagaatcctcgcagacaatacaatgtatgactcatttcatcatccaatcactgagacagtacaatcttgcagttaaaacaacaacaacaaaaacaaacaaccctcctttgaatcgagcaaaacaactgacttccatctccttgaacaaactgtgtagcgtctcacttccctgtcttgatcttacggtgtggctccaagggttcattacagaaagcttcttatccgaggagggctcaacggggtagcaggacctccgaaaggccagcctttcctgccctttccttttgttccgtagccaccactaagaggataaaggagatcacataccaacccaagacttcttcataagtatggctctttgattactggtacaccactaaactgaagtatcatgtccagacacacagcacccagatgaacctatttcccaagtgctccacagctgtgagatctgtaaatgccccagttcccaccaatgtttccaattgccatacagctccttgcttatgggaattgtgggtgacagctcagaagtccaagccacaaacacagccagagtcctcaactacacagtccccaagaaagtgagcaaagagacggggcacaccaattgcccccattagaatgattcaccaccatgaaagctagtgacagaaacccacccatacttacaggtaaagaaactgaagcccatatttctaagagttgagtacaaagccaatttccatacaagagagaccagaaccctggttgtctggctaaagtctggtgctatgcatacttccactacatggtaagcctatttggatctcttttaagccttaaggatataggccagttcccatggttttggcttctactgaatccaaaatgttttccaagcacgatttaaacactgcttttcctttgcccatcccaccctctgtgtaactgctcccagtgtctcataaaccagagatttgtgtgtgcgctaacatgccaagatattggctgcaatatagcagaccccacccagaaccctgtacctttagatgcatattaaagtcctggcttttgaagggttaaccattttatttaaaccagaccttcgtactttaaaaaaaaacaaatacttcttttactaagaatgctcaaggaaagtacactagttgcgtgtatttcttaattgtctttgcccccttttcctggaagcctaaaaatggtaccagtagattaagctggttttctttccaaattgccagggacctacagctcacattagtcacccccgttaaggccacagattaaatgtcaggatgtactgtagacattttccaaaggaaacggaaaacacgttacatgaattttagagcaaactgtaacaaacactaaccgtaaatagccttcccagataactgcttcatatactagatccatttacgaaataacagtagaagcagtgaacaaccaagtcctaacactgtgtccaagacagcattactgccctagctgcttacatttctgccccaagggttcctcctgcctctctttttaccaggtccaacctccctgcactcaggtaacttactcttgcaagtcaagggcaggatttaagctaaggtaagggccttattttaaccctcaactgtggtccagcaatgacccccatgtcttcattattctcctaaactcacataactaaatctagaaatcttcagtgacagaaagaaggatgaggatgacgaatgtacagagtcaggctcatggagccttctcaataacaaacgaagggaaggagaaggttccgtctgcacggagtcagtttcgtggcctgcctccttgatttggattttttggagagagtaggtagctccataatagagtttactggaaatgacctgaacagatttctaaagtttatcaggtcgagacttctttatcttagaaagattgtcttgattcatgctactttctgcacctttctagggagtcctaaagactcttccaaaatatcaatggaatgacaggacatctggggcagactgaatacaagttttgttccataagagtcccctgatccactgaagctattaatgctatagtgttagtcaggggaagaggcccaatggtctttattgcaaaggaggatattgtgttacctcactacaatccagatataaaacaatgtagagaaacaagacaaccatcctgggctgcacattgttatttactcaaaggccatattgaaagtcttgcacaaagacttgcacaaaagactcccctagagtcttggggaaagggaggttggtgacatgcaatacatctaaaagaggtctcctagaagtgatgagaatgagctggacctcaaagatgcagattttgataaatgacacggaggattcctggaacacagcagtaagaacaaaagttgccctgttcatagcctacaggaacacaaagagaagagccagcctagtctgactgtccttatctgtgccataacccactcccttcagaatgtgccctgcctaccaatgacccacaggatcctcccatgcctcatacaacctttccacccgggaagatggtgcacacccaagctccagccatgtgagtctgcttgatccaccaccaatccccaccaccacagtcttccctatccctaggtccaccccaatattccaggcttggaccagaatgcacaccctgcataacagcccagttccctgtgttcacctgagttcattcaccctaagctatttccaggctcaatgtttaacccattcagacatcctcagttatgccccaacctactctttccatgtatcagtcacaaaactaataatattttttaaaatgccacatgcccagatctcattggaaaagtacaaacaatatgaaagatcggatcagaaacccctctctgaaacctacaagtcctgtagagatgcttgcccgtgattattaactggaagaaccctaggacacagaatttaaagaaaatcataagcttcatcaaatgattcaaggagtttaaagaaaacacaaagaaacatctcgatgaaatttaaagaaaagtaaccctaaagacaataaacacctgagtgatactcaagacagacaaacagaaggctgatgtaaatcatgaagaccatccaggatttgaaaacagaagtctataaacagaaacattaaagaaggctcaagctgagatgaagataagattgaaaaactcagtgacacaactagaaaacttagaagaaagggcaaaagtgaatcagaagacgatatcaggacttgaaaataaagggggatctagaggaaactagaactataaaaataaataaataaataaaatgtgaagaagagatatacaggaaatgtgggtcgctgtaaacaaacaaacaccatagaaaactttccaaaactgtaaaataatacacccatgtaagacgtcaaatagacaaggccagaaaagagcgtctccatagcatatcgtagctaaagcattaaatagacacaacaaagaaagtgttttgaaagatgcgagagggaaaagataagattcaagtaaagagagacccatcagaacaacggctgatttcctgatggaatctttgaaagcagaatggccatgaaaaacacattccaagtcctaaagacattgatagtcaacctacaataatgcacccagcaaaacaatctgacatagttgaagaaggaagaaaagttgtccatgatataaacagcctaaaaaaaaacaaaaacaaaaacaaaaacccaaaaacaaacaaacaaacaaaaaacaaaaaacatgtatatccaaaaaaacaaactcaaagagcagacaggacgcactattgtaggctgaagagaggagtaagcaaaaccaagagactgtaggaacagagaggtagccattattactaagacacaaagtacccctgagagcataaacaacacagacaaaagtcaacaatgccccaaattaacatgcacatttcagtcctaactttagatataagtggcctcagttctccattcaaaagccacagactggctgaatgggtcaagaaacaaaacacatggatctgttttctgaaagaaacacatcttggcttaaaaaaaaaaaattagggtctgccttggagtaaaaggctaggctcagtccctgcagaagaaaaccccagcctgtcttctggagaacggtggagtctgctctgcccaagagctagctgttgacatttctcacaaaacaccaagaaaaatacagagagagaaaaacctttcagtcttgaaaattatactttataatccattatggtgaaaactgtccagctaatagataagtctaacactgtagccatgtgtgtcagcccctataatcaatttagtttctttccaagcttttcctttaatattgtgttaaactattccatgagctggttgagaacataacggacatgaaggttcatgtgataagtaattccacaagtcatttttgaaagcataagtgcatttgacctaacaaggctaattcacatattaaagggccagcccttacaattgtcatgttcatcccataactatttctccaggaacctggcagtttaattcttctcctttatctttctggcctcaccgtaccaaatggttttcagaacaggaggaaaaagaaaccgttttctagcatctgttttaaatctgggttttgtctgcattgtgtgtctgactttgtccttatatttgttttacaacaaaaacaaaatagagagaagatatcaactctgtcctcaaaagtttatataagatcctcttcgctgttgataataaaagcagctctattttataacattgatctcatccatgatccacagccatccagttccctcacttccttctagttttctcttttgaacgcagatgggggattagtcaatggcatgtgcattccttcaaggtccccgaatagctgctgtgtctatagagttagtctgtccatgggtccacagataccaccgatcacccactcaccctttgaacttatatttggatcagatcagcgagaggtggtatgaagagtggtgtttaatacataatctttccataattactagccctcaagcaattcatgactcctgatgtaacataaaaccttaggtgtgagacaacccaggtctcttcctattttcctactgtgactattgagtgacagagaaaagataaatatgaggtcaaataaagctataagcttcaaagatcatataaaataatctttgttgctaattgattaattaaactgattttatttacattcatagtgtgtatctttgatctagctgagtatcgagatctgaaatcatttaacacagattccaatgccatttctattgtttgaaatatgctccttttagacttaatgaatcagaatttcaaaaaaatatgtcaagtaatatgcagactcaacagacatctattagtaaaatctacagtggaccattgctttgaactagtctactgcagcagggtacaacagaccacatagcttgttttgacgatgggaaaagcaagctatatcagtttcctaggatgctagaacaaagcattaaaaaccaagtgccttaaaaaagaaaggaatgactcaggatagggaaataccaggacagggaattgggaatgggtgggttagcaaacagcaggagggggtatatgatggggggttttcagaggggaaatgaggaaacaagataaaatatgaaatataaataaagaaaatatctaataatttaaaaaaagaaaaaaaagagaaaggaattgtcacaaatttctaaacactgacatcaaggcatgtgtggtcccatgttcattattcagcctgtagtgtagatttttagccttgactggtttgctagagcatctgttgactctcatttccagttattcagtttctgattctataggcatgtgacaagttcctctcaatgtaactttctctatatatggtctccttttataaagaccccagacatatcggggtaaagaactactgtaatccattgtgattttgttctggttaattatgagacaaggcctcatgctgtatagccttgtctggc

SEQ ID NO: 1109 - DNA, 8623 bp, Mus musculus
  misc_feature (1)...(8623): n = A,T,C or G
atggggagacggcggcggttgtgtctccagccctacttcgtgtggctgggttgcgtggcgctctgggcgcagggcacagatggccagccccagcctcctccaccaaagacgctccggccccagccgcccccgcaacaggtccgacccgcagtagcgggctccgaaggtggcttcatggggcctgagtatcgggacgagggcgcggtagcagcgagccgggtccgcaggcgaggacagcaggaaatactccgagggcccaacgtgtgcggttctagattccactcctattgctgcccaggatggaagacgctccctggaggaaatcaatgcattgtccccatttgcaggaacagttgtggagatggattctgttcccgccccaacatgtgtacttgttccagtggacaaatatccccgacatgcggactgtctgtgagaatggatgccagaacggggggcgttgtatcggccctaaccgctgtgcttgcgtttatggattcaccgggccgcagtgcgaaagagattacaggacaggcccgtgtttcactcaagtcaataatcagatgtgccaggggcagctgacaggcatcgtctgcacaaagacactgtgttgtgccaccatcggacgagcctggggccatccttgtgagatgtgtccagcccagcctcagccctgccgccggggcttcattcctaacatccgcactggagcatgtcaagatgttgacgaatgccaggcgattccaggactgtgccaggggggaaactgtatcaacacagtgggctcgtttgagtgcagatgccctgctggtcacaagcagagtgaaaccacacagaaatgtgaagacattgatgagtgcagtgtgattcctggggtctgtgagactggcgactgttccaacaccgtgggaagctatttttgtctctgtccccgtggcttcgtaacctcaacagatggctcgcgttgcattgatcagagggctggaacatgcttctccggcctggtgaatggccgttgtgcccaagaactcccgggccgaatggcaaaagctcaatgttgttgtgagcccggccgttgctggagcatcgggaccattccggaggcctgtcctgtcagaggttccgaggaatatcgtagactgtgcctggatggtcttccgatgggtggcattccagggagctcggtttctaggcctgggggcacggggagcaacggcaatggctatggccccggtggaacaggcttcctccccatccctggagacaatggcttttctccgggtgttgggggagctggagtaggagctgggggacagggacccatcatcacgggactaacaattctcaaccagacaatagacatctgtaagcaccatgccaatctctgtttgaatggacggtgcatacctactgtttctagctacagatgcgagtgtaatatgggctacaagcaggatgctaatggagattgtatagatgttgatgaatgtacatccaatccctgcagtaatggagattgtgttaacacacctggatcctattactgtaaatgtcacgctggattccagaggactcctacgaaacaagcgtgcatcgatatcgatgagtgcatccagaatggagttctgtgtaagaatggccgatgtgtgaacacagatggcagtttccagtgcatttgtaatgctggctttgaattaaccacagacggaaaaaactgtgttgaccatgatgaatgtacaacgaccaacatgtgcttgaatggaatgtgtatcaacgaagatggcagcttcaagtgcgtgtgcaagccaggcttcgtcctggctccaaacggccgctactgcacagacgtggacgaatgccagaccccaggaatctgcatgaacgggcactgcatcaacaacgaaggatccttccgctgtgactgtcctcccggcctggctgtgggtgtggacggacgtgtatgtgttgacactcatatgcgtagcacctgctacggggaaatcaagaaaggagtgtgtgtgcgtccattcccgggtgcggtgaccaagtctgaatgctgctgtgctaatccagactatggttttggagaaccttgccagccttgccccgctaaaaattcagctgagttccatggcctctgtagcagtggcatcggcatcactgtggatggaagagatattaacgagtgtgccttggaccctgacatatgtgccaatgggatctgtgaaaacctgcgaggcagctaccgctgtaactgcaacagtggctatgaaccagatgcctcaggaagaaattgcattgacattgatgaatgcctggttaataggctgctttgtgacaacggcctatgcagaaatacccctggcagttacagctgcacgtgtccccctggctatgtgttccggacggagacagagacctgcgaagatgtaaatgaatgtgagagcaacccgtgtgtcaatggagcctgcaggaacaacctgggctctttccattgcgagtgctcgcccggcagcaagctcagctccaccggactcatttgcatcgacagcctgaaaggaacctgctggctcaacatccaggacaaccgctgtgaggtgaacattaatggagccaccctgaaatccgaatgctgtgccacacttggagccgcttgggggagcccctgtgagcgctgtgagctagatgcagcttgcccaagagggtttgccaggatcaaaggtgtgacttgcgaagacgttaatgaatgcgaggtgtttcctggcgtctgtccaaatggacgctgtgtcaacagcaaaggctctttccactgtgaatgccctgaaggtcttactctggatggtaccggccgggtgtgtttggatatccgtatggagcactgcttcctgaagtgggatgaggatgagtgcatccaccctgtccctgggaagttccgcatggacgcctgctgctgtgcagtcggggcagcttggggcacagagtgtgaagaatgtcctaagcctggcaccaaggaatatgagaccctgtgcccgcggggcccaggctttgctaacagaggggacatcctcactgggcgtccattttacaaagatatcaacgagtgcaaagcctttcctgggatgtgcacctatgggaagtgcagaaacacaattggaagcttcaagtgccgttgcaataatggcttcgccctggacatggaggaaagaaactgnnnnnnacattgatgagtgcaggatctcccccgacctctgcggcagcggcatctgtgtcaacacgccaggcagctttgaatgcgagtgctttgagggctacgagagcggcttcatgatgatgaagaattgcatggacattgacgaatgtgaacgtaaccctctcctttgtaggggtggcacctgtgtgaacactgagggaagctttcagtgtgactgcccactgggacacgagctgtcaccgtcccgtgaggactgtgtagatattaacgagtgctccttgagcgacaacctctgtagaaatggcaaatgtgtgaacatgatcggaacttaccagtgctcttgcaatcctggataccaggccacgccagaccgccagggctgtacagatatcgacgagtgtatgataatgaatgggggctgcgacacccagtgcaccaactccgaaggaagctacgagtgcagctgcagcgaggggtacgcactgatgccagacggacggtcgtgcgcagatattgatgagtgtgaaaataaccccgatatctgtgacggcggccagtgtaccaacattcctggggagtatcgctgtctctgttatgatggcttcatggcttcgatggacatgaagacgtgcatcgatgtgaacgagtgtgacctgaatcccaacatctgcatgtttggggaatgtgagaacacgaagggctctttcatttgccactgccagctgggctactcggtgaagaaggggaccacaggatgcacagacgtggacgagtgtgagattggcgcccataactgcgacatgcacgcctcatgtctgaatgtccctggaagcttcaagtgcagctgcagagaaggctgggtgggaaatggcatcaaatgcattgatctggatgagtgcgcgaatggaacccaccagtgcagcataaacgcccagtgtgtcaacaccccaggctcctaccagtgcgcctgctcggagggcttcacgggagacggctttacttgctcagatgttgacgagtgtgcggaaaacacaaacctttgtgagaacggccagtgcctgaatgtcccgggagcttaccgctgcgagtgtgagatgggcttcaccccagcctcagacagcaggtcctgccaagatattgatgaatgctccttccaaaatatctgtgtctttggaacctgtaacaacttgcccgggatgtttcattgtatctgtgatgatggttatgaactggacaggacaggaggaaactgtacagatattgatgagtgcgcagaccccataaactgtgtcaatggcctatgtgtgaacacgcctggtcgctatgagtgtaactgcccgcctgacttccagctgaaccccactggcgtgggttgcgttgacaaccgcgtgggcaactgttacctgaagtttggtcctcgaggagacgggagtctgtcctgcaacacagaggtcggcgtaggtgtcagtcgctcctcctgctgctgctccctggggaaggcctggggaaacccctgtgagacatgccctcctgtaaacagcactgagtattataccctgtgtcctggaggcgaaggctttagacccaaccccatcacaatcatcttagaagacattgatgaatgtcaggagttaccagggctctgccagggtggaaactgtatcaacacttttgggagtttccagtgtgagtgcccacagggttactacctcagtgaggaaacccgcatctgtgaagatatcgacgagtgctttgcccatcccggcgtctgtggacctggcacctgctacaacaccctgggaaattacacttgcatttgcccgcctgagtacatgcaagtcaatggaggacataactgtatggacatgaggaaaagcttctgctaccgaagctataatgggaccacatgtgaaaacgagctgccttttaacgtgacaaagaggatgtgctgctgcacatacaatgtcggcaaagcctggaacaaaccttgtgagccgtgcccaaccccagggacagctgactttaagaccatatgtggaaatattcctggattcacctttgacattcacacaggaaaagctgttgacattgacgagtgtaaagagattccgggcatctgtgcaaacggtgtgtgcattaaccagatcggtagcttccgctgcgaatgccccacaggcttcagctacaacgacctgctcttggtctgtgaagacatcgatgagtgtagcaacggcgacaatctatgccaacgaaacgcggactgtatcaacagccccggcagctaccgctgcgagtgtgcggccggcttcaaactctcccccaacggggcctgtgtagatcgcaatgaatgcttggaaattcctaatgtttgcagtcatgggttgtgtgttgatctgcaagggagttaccagtgtatctgcaacaatggctttaaggcttctcaagaccagaccatgtgcatggatgttgacgagtgtgagcggcacccgtgcggaaacgggacttgtaagaacactgtgggatcctacaactgtctgtgttaccctgggttcgagctcactcacaacaacgattgcctagacatagacgagtgcagctcgttttttggccaggtgtgcagaaacgggcggtgcttcaatgaaatcggctccttcaagtgcctgtgcaacgagggttacgaactgactccagacggcaaaaactgtatcgatactaatgagtgtgtcgcacttcctggctcctgttctcctgggacctgtcagaatttggagggctccttcaggtgcatctgcccccctggatatgaagtgagaagcgaaaattgcattgatataaatgaatgcgatgaggaccccaacatttgcctttttggttcctgcaccaacaccccagggggcttccagtgcatctgtccccctggctttgtcttgtctgacaacgggcggagatgcttcgatactcgccagagcttctgcttcaccaactttgaaaacggaaagtgttctgtacccaaagccttcaacaccaccaaggcaaaatgctgttgcagcaagatgccaggcgagggctggggggacccgtgtgagctgtgccccaaagatgatgaagttgccttccaggatctgtgtccatacggccatgggacagtccccagtcttcatgacacacgtgaagatgtcaatgagtgtcttgagagcccaggcatttgctcaaatggtcagtgcatcaacactgatggatctttccgatgtgagtgtccaatgggctacaacctggattacactggagtccggtgtgtggacaccgacgagtgctccatcggcaacccctgcgggaacgggacgtgcaccaacgtgatcgggagcttcgaatgcacctgcaatgaaggctttgagccggggcccatgatgaactgcgaaggcaaacatcaacgagtgtgcccagaacccgctgctctgcgctttccgctgcatgaacacttttggatcttacgagtgcacgtgcccagttggctacgccctcagggaagaccaaaagatgtgtaaagatctggacgagtgtgccgaggggctgcacgactgcgagtctagaggcatgatgtgcaagaacctgatcggcaccttcatgtgcatctgccccccaggcatggcccgcaggcccgatggcgagggctgtgtagatgagaacgaatgcaggactaagccaggcatctgtgaaaatggacgctgcgttaacatcattgggagctacaggtgtgagtgcaatgagggattccagtcgagttcctccggcactgaatgcctcgacaaccgccagggtctgtgcttcgccgaggtactgcagacaatgtgtcagatggcctccagtagccgcaacctcgtcacaaagtcggagtgctgctgtgacggtggccgaggctggggccaccagtgtgagctgtgcccacttccaggaaccgcccagtacaaaaagatatgtcctcacggcccaggatacgccactgatggaagagatatcgatgaatgtaaggtgatgccaagcctctgcactaatggccagtgcgtcaacaccatgggctccttccggtgcttctgcaaagttggctacaccacggacatcagcggaacagcttgtgtagacctcgatgaatgttcgcagtctccaaagccatgcaacttcatctgcaagaacaccaagggcagttaccagtgctcctgcccacgggggtacgtcctgcaggaggacggaaagacgtgcaaagacctcgacgaatgtcaaaccaaacagcacaactgccagttcctctgtgtcaacaccctggggggattcacctgtaaatgtccgcccggtttcacccagcatcacacggcttgcatcgataacaatgaatgtgggtctcagccttccctctgtggtgcaaaggggatctgtcagaacactcctgggagcttcagctgcgaatgccaaagagggttctctctggatgcctctgggctgaactgtgaagatgtcgatgagtgtgatgggaatcacaggtgccaacacggctgccagaatatcctgggaggctatcggtgcggctgcccgcagggctacgtccagcactaccagtggaaccagtgtgttgatgagaatgaatgttccaacccaggtgcctgtggctccgcctcctgctacaacaccctggggagttacaagtgcgcctgcccctccgggttctccttcgaccagttctccagcgcctgccatgatgtgaatgagtgttcctcctccaagaacccatgcagctacggctgctccaacacagaaggcggctacctctgcggctgcccaccagggtacttcagagtgggacagggccactgtgtctcgggaatgggcttcaacaaaggacagtacctgtcggtggatgcggaggcagaggatgacgaaaacgctctgtccccagaagcatgctacgagtgcaaaatcaatggctacaccaagaaagatggccgacggaagaggagcgcgcaggagcctgagcccgcctcagccgaggagcaaatcagcctggagagcgtagccatggacagcccagtcaacatgaagttcaacctctccggccttggctccaaggagcacatcctagaactggtccccgccattgagcccctcaacaaccacatccgttatgtcatctcgcaagggaacgaggatggcgtcttccgaatccaccaaaggaacgggctcagctacctgcacacggccaagaagaagctcgctcccggcacatacacactggaaatcaccagcatccccctctatgggaagaaggagctgaggaaattggaggagcacaatgaggacgactaccttctgggggtgctcggggaggctctccgaatgaggttgcagattcagttgtattag

SEQ ID NO: 1110 - protein, 1288 aa, Mus musculus
  VARIANT (1)...(1288): Xaa = Any Amino Acid
SGMRMSASTLSLGSSAWTPAAVQSGQLGAQSVKNVLSLAPRNMRPCARGAQALLTEGTSSLGVHFTKISTSAKPFLGCAPMGSAETQLEASSAVAIMASPWTWRKETXXXIDECRISPDLCGSGICVNTPGSFECECFEGYESGFMMMKNCMDIDECERNPLLCRGGTCVNTEGSFQCDCPLGHELSPSREDCVDINECSLSDNLCRNGKCVNMIGTYQCSCNPGYQATPDRQGCTDIDECMIMNGGCDTQCTNSEGSYECSCSEGYALMPDGRSCADIDECENNPDICDGGQCTNIPGEYRCLCYDGFMASMDMKTCIDVNECDLNPNICMFGECENTKGSFICHCQLGYSVKKGTTGCTDVDECEIGAHNCDMHASCLNVPGSFKCSCREGWVGNGIKCIDLDECANGTHQCSINAQCVNTPGSYQCACSEGFTGDGFTCSDVDECAENTNLCENGQCLNVPGAYRCECEMGFTPASDSRSCQDIDECSFQNICVFGTCNNLPGMFHCICDDGYELDRTGGNCTDIDECADPINCVNGLCVNTPGRYECNCPPDFQLNPTGVGCVDNRVGNCYLKFGPRGDGSLSCNTEVGVGVSRSSCCCSLGKAWGNPCETCPPVNSTEYYTLCPGGEGFRPNPITIILEDIDECQELPGLCQGGNCINTFGSFQCECPQGYYLSEETRICEDIDECFAHPGVCGPGTCYNTLGNYTCICPPEYMQVNGGHNCMDMRKSFCYRSYNGTTCENELPFNVTKRMCCCTYNVGKAWNKPCEPCPTPGTADFKTICGNIPGFTFDIHTGKAVDIDECKEIPGICANGVCINQIGSFRCECPTGFSYNDLLLVCEDIDECSNGDNLCQRNADCINSPGSYRCECAAGFKLSPNGACVDRNECLEIPNVCSHGLCVDLQGSYQCICNNGFKASQDQTMCMDVDECERHPCGNGTCKNTVGSYNCLCYPGFELTHNNDCLDIDECSSFFGQVCRNGRCFNEIGSFKCLCNEGYELTPDGKNCIDTNECVALPGSCSPGTCQNLEGSFRCICPPGYEVRSENCIDINECDEDPNICLFGSCTNTPGGFQCICPPGFVLSDNGRRCFDTRQSFCFTNFENGKCSVPKAFNTTKAKCCCSKMPGEGWGDPCELCPKDDEVAFQDLCPYGHGTVPSLHDTREDVNECLESPGICSNGQCINTDGSFRCECPMGYNLDYTGVRCVDTDECSIGNPCGNGTCTNVIGSFECTCNEGFEPGPMMNCEGKHQRVCPEPAALRFPLHEHFWILRVHVPSWLRPQGRPKDV

SEQ ID NO: 1111 - DNA, 299598 bp, Homo sapiens
  misc_feature (1)...(299598): n = A,T,C or G
acccccaactcaaaggaaatagactgcagcaccaattggctgaatttgtagtcaagaaaacttttcttttgagctatttacagcttttaggaattgagtaaaatatactcctgtaaacaaaatctggagcatatttctttctactttatttctccagaatttagaaattatttatatctttttggggtggttgcggggacagggtctggctgtcacccaggcaggagtgcagtggtgcaataacagctcactgccttctgggctcaaatgatccttccacaccaccatgcacagctaatttttgtattttttatacagacagagttttgctatgttgcccagattggtcttgaactcctgagttcaagcaatctgcctgcctcagcctcccaaagtgctgaaattacaggtgtgagccactgcacctggccttatatcaccttttgttgggattctgagttataaatggccctcaccataccgatgctttctcactgaatgcttctctatcctgaatacaagagaccctaatacttagacaggaatatcatcacccattcagcctgaagaagttacagaagatgaaccttttaggattaagggtcccttttagaagggagaggggaaatatgtcagaggtgtttgaatcagagcaactccattctgaatagggactggataaaatgaggctgagacttgctgggttgcatccccaggaggttaggcattctttgtcacaggacgagataagaggttggtggaactggtttcacaagatacaagtcacaaagacccagctggtaaaacaggatgcggtaaagaagccagccaaaacccatcaaaaccaaaaggaggagaaaagcgaactctgattgtcctcactactcattatatgccaattataatgcatttgcatgctaaaggatactcccaccagcacaatgatggtttacaaatgccatggcatttgaagttaccttatatggtctgaaaaggggaagaaccctcagttctgggaactccccatccctttctcgaacaacacatgaacaatccaccccttgtttagcaaataatcaagaaacaaccataactatactagttaagcagcccatcctgtgctgctctttctatggagcagctattcttttgtttctttatttctctaatatatttgctttcacttaaaaacaaaaacaaataaccaatattttgtctgttgatattctctattgctttcctgttttcaatttcttaatgtctgctgtaatttttatttcttttcttcaatctatcttgtattaatttgcttttctttttttgtttcctaatgtggaagcttagatcatcgatgttagatattccttctttgctaatatatgcattcagtgttataaatgctcctcaaagcactgctttctctgcatcctgaaaattttattttattttattttattttatttatttattttgagatgagtttcactctgacaccgggctggagtgcagtggcacaatcttggcccactgcaacctctgcctcctgggttcaagtgatactcctgcctcagcctcctgaatagctgggactacaggcacatgccaccacgtccacatccagctaatttatgtattttttagtagagatggggtttcaccatgttgtccaggatggtctcgatctcttgatcacagatctcttggtctgcccacctcagcctcccaaactgttgggattacaggcatgagccaccgcacctggccctgaaaattttaataagctctattttcatttttatttagtttaaaatattctttaatttctcttgagacttcttttttggcatgtttgttatttagaagtttattatttaatctccagatagttagggatttttccagctctattctgtcttttgttcctaatttaattctattgtgatctgagagcatactttgtatgatttctattctcttagatgtttgttaaggtgtgttttatgggcaaagttgtggtctatctgggtgaatattccatgagagcttgagaagaatgtgtattctgtagttattaaatgaaatatactatgaatgtcaactagatccagctgatcggtggtggtgctcagttcaactatgctctcattggttttccatctgctgcatctttaaattactgatagagggttgtatatacagttttaataattatcaacattttgccatttcatctattaacctccttttttcaatcgcatgggatgaaatatctctacattgacagaagatgggtaagaatgtgtcaagtttctttaaaaaggttttatccttaatattttaaatgttttaaaaagcatagattcacagagaattgcacagatagcacagagagatcctgtttaccctttacctagtttctcccaatggttatttcttatgtacaatataaaaaccacaaaattgacactggcacaatgtgtatgtataattctattccatttttcacatgcacagatttgggtaagcaccaccaagtggttagagaactatttcctcatcacaaaggtctccctgtgctacccctttaacttatcacagtctactagtattatcattttaccagtatagaaaccttaccaccttttatgtgtctttcccttcctctgtttacaaaataattttcttaaatatttcttatatatacctgagacaatgttataatttttgtatgaaccatatttagaaaaatcaagagataaaatttattgtaattactcatacttttccatatattccctctttttgttctttcttccttcttgtttcaagaatcctttggttaatatttcatttctgattaaataatttcctttagccattattttagggtgggtctgatggagacacattcttgttttccttcatttaaaagggtcttcatgtgtcctttatttctgaaggatatttccactgggtatagaattcttggttgacagttctttactttctttcagcactgaagaaatgggtgtcactcccttctggcttccacactttttgatgtaaaatctgctatcatttgaattgtttttttccagaaaggacaagtaaagtgtcctttctttcgctgctttcatgatttttttctttgcctttaattttcaaaacttggactatgatgagtcttgatgtgaatgcctttgggtttattctgtttaggacttattaggcttattgaatctgtatatttatgcaaagcccaaaatttgaaaatgtttcaccattatttattctccaagtaatttttcagcagctttatcctctttctcttcctttgaaattcagataatcaaatgttacatattttattatagtctcatagctccctaaggctgtttgatttttcagtgtatatactcttcattgttcagtttgagtgatttctatttttctatcttcaagttcactgattctttcctctgctctctgaattttgctgtgaaacccatctattaagttttaaaattttgttttatttttaaattctaaaattttcatttggttcttctttatgtcttctatttctgtgctgatgctttctactttctttcttttatcatctgtttcaagagttttacaatggcccactgatgcatttttattgtagttgctttaagaatattgtcagacaattctaacatctgtgtcatctcagtgttgatgtgtattgattttcttttctcatttaagttaagatcttcctggttctttcaatgataaatgattttcagttgaatcttggaattaaaaaaaattgctggtaaatagtaggtgtatatgaatcttggacattttttactttattttgtgagactttgggttatatttaaattctttgttttagcagcctcctctgatactgcaatggtgggcagacagggcaagggatgcctcattactgctagatgacggtggaagtccaagatctacatgcagcctctgttgacactcttgaggggaggagtaacttgttatttattactgggcaggggtgacagtacagggtcaccactcaagctcttctgtaccactctggctaggacagtggtgtttcattactgctcccaatgtagtttcccatgatattccatgacaccttggtggtggtgggatggcctcattactgctgggcagtgagaagattcctgagcatctactaggtatcttctgacaccatcccagcagacaggggcatctcattactgttaggtggaggtggaagtccagcttctccactgacaccatggggagaaggtggctcacgactgtgcagggggatgaaagtctgagctttccacttggctttctctgacactatccaggagaaggggagggataccttgctacaccctggtaaggatgaaagtctaggctccttacttggccattgttggtaaaggtgactacagtttttttctgtggtttggttagggcagttattgtctaaaagtgttttgtctttctaggctatccctttcttgtcttttggctagagagggcaggctttctttcgaggctttctttggtctgttgccaatggcatttccaaattgccagatttcctagcactcattctgggatacaaaaagcaaaagacaattcaggaaaaccaccatcatgtcattcctcaggttccaaggtcactagcagggtaactagtctgccttcttctccctaccatttacagtcttcttatgtgtgcatgctctctctctccacatatatttatttatgtttagttaagtatacttgccaagaggaataaagtacatctaatccactctgcctttgttcttcttgcagtattttgaatcaaacccaggcatcctatcatttcatctataaagactttagtaagtataacattagccagtatattaaaaatataacaatgattccattgtcacatctcccaaaattaaaaataaatatttaatatctagtaaccagtgttcagttcagtgttctatcactacataacaaattacccctaaagttataggtttaaaaaatttattttgccttagccttttatgggtcaggaactcagaagagtttgcctgggtagttcttacttggggtgtctcacgcagttgcagttatatattgactgtagctgcaaccatataaataagacttactagactggatgatagcatcaaaaatgttatttttcactaacattcatatcaaaatcccagataaggggcaagcattgcttttggtggttgtgccataacagttcccctccctcttctctactgatgtcatttatttgaagaacttggtcttgtggtatatcccattctagatctggttacctatattctcaaggtatcatttaatatgtttcatggtcctctattgttcttggaaactgggagttaaatgtagagatatggttacattcaggctcagtttttttgacaaagatatttcataggtggtctgtgtacctcctattgcaccataaaaataaaaacataatgtctggttgtcttacttttcataagttaataattaatcagtaggttctggtggtaacagcttgacacattcactaaaaagttcccaattgactttttgatgcacggcttcccaagtaaatttgtattttggaccagataatgctttgctatgggagactggcctgtacatcgtagaatgtttagcagcatctctgatactctcatcaccactcccacacactgtcttgttgtgacaataaaaaatgtctccaattactgccaaatataccctgaggaaaaatggccacaagttgaacacttcttacctaatggttttagcagttgttaaaaaccgttgcctaggtccattattttattagggtttacaagtagtgatttttctaattccatcattcctgcatttacaactgtggttttttttttttttcaaaagaaatactttctctgggtctttctagcaaaggaagaataactggttaataattttatttatcgatgcgtttagaatagtgagctgtgccctaacaacctccaaaagtggccaactaatttttgtttggagtatcattcggaaatcttgaatactgacacacttcatgtatttcaatcttttgctgtcattttttttttctttttgatgctcaagtttccccatccttaaccagcaagatctctttcaacttagctcaggtttccttttgacatgaccttaatagtcagataatttcttgctttcaggcatgacaagacagatagtccagattcactttatgcatttcctttcccagacttagaatctgccactcacccaaggaaccctgattcctttaatttagaaatggtatttaggaaccacaatctggtcacaatgaccttatggtttttgggttgtcactatttctaggtctttggaacatagttccaaagccagaactataaaactaagtttatttagaaaggtttagcttccaccattgtttctttcctcatagtctcccctttctctacagataaccattttttattagatttagtttatacttcttgtttgttgttaaatctataacacactcatacccctaaaaagtagcatacaatattatacagctttcatttaaaaaatattgtaaaaaatagacataacataaaatttaccattttaatcatttttaagcgtgcaattcagtagcattaagtacatgcacaatgttggaccaccgtcaccattatccatttctaactttttcatcatcctaggcagaccactttgtactcactaaacaataactcatccttcccattttcctggagctcctggtaacctttattctactttgtctcaatgaactgcctagtctatctgtaccttgctttttttttattttagtagactgtatatgctagagatcactctctaagagcatacagagtttctcttcattcatatttgacagctgcataatacttcactgaatagatgaagtcatacacaacagttgcttgttcatgggaagtttgtgtttctagtctttcactattataaacagtgctgcaaagaacagtcaaatgtatgcaccatttcatttttttttgtctatgtatcttttatataggttcctaaaagtggaattgctggatcaaagggtaaaggcataggcaattctagagcatttagatttaatgtgatggacaggaatgaaccatgaagccacgtaagtattaaacaacagcaacaacaacaaaaaaagcagatacaggatgttttaaatggtatgactaaaacactgctttaaaccaggagatagttacattagttagctcttttagtttaaataattttattatttgaagcgaagtacgtgaaaataactgtattgctctttctctggattttaacaaatcggtgtctcacatgaaattatgtaactcttatcttttcttctgctttatgagaatactgtaacaaggggtactaccttcagaccctttgactacatggagaaataaaggagggagttgtgccaattactggagaattttggctgtcaaatagcacatctgggcaatttgggccagaaatacatatatatgatatatgatatatatatgatatatgatatatatggatactatgatatatatgatatatatgatatatgatatatatgatatatatgatatatgatatatatgatatatatgatatatgatatatatgatatatatgatatatatgatatatatgatatatatgatatatatgatatatatgatatatatgatatatatgatatatgacatatataatatatgatatatatgatatatgtgatatatgatatatatgatatatgtgatatatgtgatatnnnnnnnnnnnnnnnnnnnnnnnnnnnnnnnnnnnnnnnnnnnnnnnnnnnnnnnnnnnnnnnnnnnnnnnnnnnnnnnnnnnnnnnnnnnnnnnnnnnnnnnnnnnnnnnnnnnnnnnnnnnnnnnnnnnnnnnnnnnnnnnnnnnnnnnnnnnnnnnnnnnnnnnnnnnnnnnnnnnnnnnnnnnnnnnnnnnnnnnnnnnnnnnnnnnnnnnnnnnnnnnnnnnnnnnnnnnnnnnnnnnnnnnnnnnnnnnnnnnnnnnnnnnnnnnnnnnnnnnnnnnnnnnnnnnnnnnnnnnnnnnnnnnnnnnnnnnnnnnnnnnnnnnnnnnnnnnnnnnnnnnnnnnnnnnnnnnnnnnnnnnnnnnnnnnnnnnnnnnnnnnnnnnnnnnnnnnnnnnnnnnnnnnnnnnnnnnnnnnnnnnnnnnnnnnnnnnnnnnnnnnnnnnnnnnnnnnnnnnnnnnnnnnnnnnnnnnnnnnnnnnnnnnnnnnnnnnnnnnnnnnnnnnnnnnnnnnnnnnnnnnnnnnnnnnnnnnnnnnnnnnnnnnnnnnnnnnnnnnnnnnnnnnnnnnnnnnnnnnnnnnnnnnnnnnnnnnnnnnnnnnnnnnnnnnnnnnnnnnnnnnnnnnnnnnnnnnnnnnnnnnnnnnnnnnnnnnnnnnnnnnnnnnnnnnnnnnnnnnnnnnnnnnnnnnnnnnnnnnnnnnnnnnnnnnnnnnnnnnnnnnnnnnnnnnnnnnnnnnnnnnnnnnnnnnnnnnnnnnnnnnnnnnnnnnnnnnnnnnnnnnnnnnnnnnnnnnnnnnnnnnnnnnnnnnnnnnnnnnnnnnnnnnnnnnnnnnnnnnnnnnnnnnnnnnnnnnnnnnnnnnnnnnnnnnnnnnnnnnnnnnnnnnnnnnnnnnnnnnnnnnnnnnnnnnnnnnnnnnnnnnnnnnnnnnnnnnnnnnnnnnnnnnnnnnnnnnnnnnnnnnnnnnnnnnnnnnnnnnnnnnnnnnnnnnnnnnnnnnnnnnnnnnnnnnnnnnnnnnnnnnnnnnnnnnnnnnnnnnnnnnnnnnnnnnnnnnnnnnnnnnnnnnnnnnnnnnnnnnnnnnnnnnnnnnnnnnnnnnnnnnnnnnnnnnnnnnnnnnnnnnnnnnnnnnnnnnnnnnnnnnnnnnnnnnnnnnnnnnnnnnnnnnnnnnnnnnnnnnnnnnnnnnnnnnnnnnnnnnnnnnnnnnnnnnnnnnnnnnnnnnnnnnnnnnnnnnnnnctcttcccctcacccaaccctggttcccctcgttcctcagtcccgatctctcccttactctgtccccgcccactctgcgccggcctctcagtccgggttgagccccacgtgtggacggccgcgcccccactgacagccgccgcccgccggcccgccccgcgccccgccgggcctctaaaacccccgcgccgcgccctccaccgccgcatcttctccagcgcccagcctcccgccctctctcttgctggccgcacgccccggccccgcgcacctccgcccggctccgcagccgctacccgcgcttcgttgccctgtgggactccgagcgagcccagagggaaccctcctcttcttctgggggcgacttttgtttgcttgcctgtttctttctggtgacttttgcagctttccaatatccgtcttcggagcgcacgggaatccgccgagctctgcgtgcaggcccttttttcttttgaggttcacattttttgaaattttacgccagggcttttgtaatttcctcccccgcccgctggcggtcctggagtcgctcggggctttaggccggttatgcaacgtgtaccgctcggggctgccggctgcacctccgccgcgcctcgccgctcactgcgctagacccggcgccccgcgtctcgcttcgcgggcagtcagggggccggcgctctgtcgaggtctccagctagagcagggagcccgagcccgagggagtccccggagccgacgaagggcttattagaccctgactcttttctgaggcgcgcagattttgtctttgatcactccctctccgcgggtctacggccgcgcgctttcggcgccggcgatggggagaagacggaggctgtgtctccagctctacttcctgtggctgggctgtgtggtgctctgggcgcagggcacggccggccagcctcagcctcctccgcccaagccgccccggccccagccgccgccgcaacaggttcggtccgctacagcaggctctgaaggcgggtttctagcgcccgagtatcgcgaggagggtgccgcagtggccagccgcgtccgccggcgaggacagcaggacgtgctccgagggtaagtgggcaagcggctccgcacctagggctccggcttgggggaggggggaatcctcagtttggcggctttctggcccactccgtcccagaccctttagctggagcctagagctgcagccccctttgccagaatatccaaagacccccaggagcgcgtcccccttttccttcccaaccccgcagctcagcgggcggaaagccctctctccgggggttgggcggcgggtggttagggggtccaggggtgccgatcgcagagcgtgtgcagagctcgcgctgcgggaacaggttctgaatgtccggcggcaggcgggcctgggtccgcctgctgcaggggccagagaagcctgcttgctccccacgtcggggccgccgctcgtgagccttttgtttgaggacgtgtgcagggttcacagctcaccttctcatcgtcaacccgagcgctccaccttgcgacgcgctttccttgacacgtcggggccaaagtaacagttgaccaaggaggaatggatttgggaaggagggcaaggattctttggaacggaatggtccctttgttctctgcatctggaagctagaatagtagcaaattatatgtttccatgcctcttttcgccctttaaaaaggcaggcaagggacgacagatgaaaggcagtgtttagacatttctgaccctcctgcattccagcatctagctcttttgcttccacgtctgcctcccgatctccaataatttgaagtgtaattttgatttgtttgttgtcctgaaatctactcgctcggggcattgcttacgaagaccgtttatatgttgctgcatccctctacctatctgttacgtgaccgcgcttgtccatcacaggcccaacgtgtgcggctccagattccactcctactgctgccctggatggaagacgctccctggaggaaaccagtgcattgtccgtgagtgcttggcagggatcgcagcttggggcagcgcactcggccctatctccggccgacctcttgcactcagccatttggacgcatagttgcgtttaaaatcaagtgatcacattgcactgataatcgggacgcggccccatttgaatagtggggaagactcaaccggtttgagtcagttcagacttcacttctagactctgttaaagggcaataatgataaagatttcaaagataattgaaagttttatctttctatgtctattaatacaaattggaagaggggaggagtagagcaattatctagataactcaaaaccactttttctgtaaaaaatccagatgagaccacatgttattatgcaaattatcaggcttttaactctgcttgaggtttgggccttatgaagatcaagatttcttaggcatttatataaaaccactttcttatttctggttttatatcaacaaccacataacctagatacgaaaggagcattctcgcggatttagtgttgacctaagttaacaaacttttaaaagacagaactcttacaaaggggcttgagtttttttttttttttttgctttttggaagacgtttaaatttagggtttccagaccctgaacctcaatagtgtgcagtagatttccaaagtatgaatcttagaccttgaaaaattctgtatctctgaccttaaaagttttgattattttattctgtttccaaagtgtataaccagttctccaagttctaattggagagctcattagttatcagcctcacagtcacggactctgggatgtcttatttcatatgcctgtaaatttgtgacttgcagtgtgactggccttctcctgtgtgtttatgtagcacaaccacatttgtcttgttggaaggagagccaggtatcatagacagcacattcatttagagccagtcttgactttagattgacctccatgttctccagggagaaaataattatgcaactgtgaacagagaaaaagggcaaggcacactaaccaagggataataaggatgtagtggcatttctaactctgtatttattggttttgtggttttgagatagatgcttaatgttatttctgggcagtttttaaaaaagagatgaaatctccagtgtcataaagactaatttcttcttattttttctaccttaacatcccactatttccaatggcaaaaataggaaacaactgtgttatttaaagtgacttataaatattttgaacaaatcctctgattataataagcctttgctttattttttaaaagaacatgttctgcattcttttctctccaacacagaagtcatatgtgaggcattaatggagggtgggtttactctttcaggccagtagggcattaccatggctgctttaaacttacacggatttttagactcctgaaannnnnnnnnnnnnnnnnnnnnnnnnnnnnnnnnnnnnnnnnnnnnnnnnnnnnnnnnnnnnnnnnnnnnnnnnnnnnnnnnnnnnnnnnnnnnnnnnnnnnnnnnnnnnnnnnnnnnnnnnnnnnnnnnnnnnnnnnnnnnnnnnnnnnnnnnnnnnnnnnnnnnnnnnnnnnnnnnnnnnnnnnnnnnnnnnttcatggtacgtgttgaaaatctgtaaagtcagattttattggatcagtgtggaatgggaattccagagagcagagccttccagaatatttgcagtagaaatatatgtatggccccactgatcactggtagaaaatcagctttgaaaatctcagggtaacagtgactattgtaatctgcatttctgagacttgaaatatttggatggttatgagctacattggaatttacacgtatcagaaatctatgagagtaaactttgaaatgatctttatatctgtaagaaacatttataacacttgtgtcaagacgtatctacaaaaatatttattagaaacacatctaaaaattctaagtacctaagattattaaacagtgcacaaaatagggacagtgtaatacctttatattctattgcatgagtctcatttaatgctaacagcctgcattcaattcagtagttcaattagtctgacatttaaaatgatcatatgtagaggtaataagtgaaatgaaaccgttataaactcaaaatcaagaattttaattccaggccttcctgatgataatgaattaagtaaattattatatttattggatttatctgtatcacaccatttagcaaaagaaagtatctgagaccatttacaaaaaagaaaataaataaaatacaaataaataaaaaccaaatattaattttctcatacatttgtacctcagcattcttttaatatagaaaaataaaaaatggtcaacagaattttagtgtttgacaggctttataaggagaagatattaaaaagaaactgtaattctccaagttctggaaacctaatgcattttgatttgagtctctatgttttgttggtattgtgcttagttgtagcctagaaaaattactgaagtacttccaaacttccaaatattcatttccaaaagtacgaaattgactttctcacctttttttttttaatcttcttagaacatgaagcaatgaaacaatttgcttattaatttatttattgtgaaattatgctatgaacagtattttgatcaatataataagagtgggatgaggttggctggactaaataacatttgagacctgaggaaacatcagagcattccggtataattcctttatgttatgctaccaaatgaaaacactgaacccagaaaggctgtgggtttttctggagctcatagcagatcaatggcagagtgacaactaaacttcagaccttttgggtactatgtattctttacctggccatgtgacttctcacagcatcactgaagtctcagcccctaggtcctgtctccctctccctctggtatttctaggtctcatagttttagtaattgtgggagggacgtattcagtaagtgtaccatagtctgaggctgttgtggggcaaaagggcctcagcattcttgcttctcattggctcacagatacagagtatatacctgtatccacgacaggtaaatgcctgagaatgctcagtctccagcccatcaaaccttcatttggtttggaacccgggtggaggtactttgggtctcctctcttaagcctagactaaatattggccttctggggaggaggaaactttgaaataaaacaatgttttaatgcacatttgtcattggagagttactggtgatcagaaactgtagtacattttaagaagtaagagtcaactccatggcaggaaacatattcttgcctaaaatatttttatcttaacatcacagtatttgacactattcactttttctttttttattaatttgagacaggatctggctgtcatccagactggaatgcagtggcatgatcacagctcactgcagccttgacctctcgggctcaagctgcattctgacctcagcctcctgagtagctgggactatgggcacatgccaatgtgcaaggctaatttttaaaaaaattttcgtagcgttggggtctgcccaggctgatctccaacttctaggctcaagtgatccatttgcctaaggctcccaaggtgctgggattacagacatgagccaccatacccagcccactgttttcatttataagaagtactaatgctagtagtaatatatggatatcagaaggcatcttggagaagaaaaacaattagtgagttagtttacttctgcaggaaatgcttttttcattgttgagggtcccaaatctctttgaaagttgtgggacctttccctaactacagccagtttcagagcatttccagactttcttcttgtctttatatatccagtcatggcatgagcattaaagtacacagcccttgtgccgaaagagagaactcaattatggttatagagagaaatctctcagctcctaaatgaactgtctctaaacatgggagagacttcccattcgaaggtacttggctacaagtgtggagtatctgtggaatgtattgtgtcagtgagcctaacattctttgctgtgatgaccctcatacctttctgttcattggaggtcacagctgcaggaggctttgactctccccaccatcaaaatgccacagtagcttttctgagcagtaggaatacgctaggttgtggagataatatggaaggagaaaggctgtaggaaggagagggaattattgaggggaccaaagattgatcacagggtaggtcagataccagcctggaaggaatgtgtgtggaacccttgaggcttggccaagtcattagaactggagcctctggttcagccaatttcatgttgtctgtctcctgtgaaggcttttgcatagtgggctgtattttctctattcctgcaaccctcccaactacttagaatcaaggctgtcttctctgggtgaattctgcattttaaactctcagtctttaatgaaagagacaacctgtattgataagacaattaaagatttaggattatgcaatttttttttccttattgcaaagctttaactgtttattaaaaaagtaataatccatacataagcccatcatgcagtgagatccattgtactgtttggtgaaagttcttttagaccttttaaagccagtaaatatgtgtgtgtatatatatatatatatatacacacatacatatatatacacttatatatacatacatatatatacacacacacgcacacatatatatgtattttaaacttaaaaagcctgtgctttattttattctaccatgttttcattctgtaacgtttacttacatatgactttatttttgtttctatttttccataagttattggggtacaggtagtatttagttgcacgaatatgtcctttagtggtgatttgtgagattttggtgcatccatcacctgagcagtgtccactgcaccatatttgtagtcctttatccctcacctcctcccactctttcctccaagtccccaaagtccattatatcattcttatgcctttgtgtcctcatagcttagctcccacatatcagtgagaacatacagtgtttgcttttccattcctgaattacatcacttagaataataagtctccagtcacatccaggtcactacaaatgctgttaattcattcatttttatggccgcatagtattccattatatatatggtgatatatatattatatgtatcacagttatatatatatatcaccatatatatataacagtttctttatccacttgttgattgaagggcatttgggttggttccacgatttttcagttgtgaattgtgctgctattaacatgcatgtacaagtatctttttcgaataatgacttcctttcctctgggtagatacccagtagtggtattgctggatcaaatggtagttctacttttacagccactatggaaaacagtgtggagattccttaaaggattatgcaatttgaaacagcttcatttgtttacacgttttcataaggatacctgtgagacttattcccaagtctgcaatgggtaattttattgcatatctgaagttagacatttatatcatatattttatcttagtttttcaggctttttatttttaaatacagctttcttgttttgtaaactatggtttattatatagttattcattcattttcctattgtgctttctacagcgatttgtagaaatagttgtggagatggattttgttcccgtcctaacatgtgtacttgttccagtgggcaaatatcatcaacctgtggatcaaaatcaagtatgtttcttacttgtggccttttcactgcatttttcttaagctttggagcaaatgctaaaggtccttctatgtgccagggagttttaactgttattactttagttaatccttacatcaacattatgagatactgttaataccccattttacagaatagcaaagtaaagcacacataatttaattaactggcccaaggaaacacagacttgaatccaggtattctgatgcctaagtgtatagtctcaaacactagactgtatttgttgcctttgcttaacatgtgttttgtgggttatctaagggggaaggagaggagaactccaaaggcagcatgtgtttattgagtactgaccacatactttacacataatggacctattttgcttcacatgtattaactgccaacaacttcataagataattataactgtggactatgattgtgtgattcatgacccaattagaaattgttgggtccttaaggtcgaagattaatctttgaggctagtatttaagataacattataacaaggcagaagcaagattgtttatttaattgctcaataattaaataaatgctttcttaagtcttgcctcaaactagtgtgaagtcattatatttttaatacatctttcttcaaattttccctaaaagaaggtaatatagtatgtctgactcaggaataagattcaggattcatacatcaaatgccattgtcttctgatgaaactcctgatgaaaactctcttaatttcacttcctttgaatctgccatttcctcagcttttaaaacctaccattcaaattcatcaagatttcttgaccactttaaccagaacatttcatccccaacttaacctgaacctctctttcttgcctgattacctacaagatactgttgccagtatgttcattatcctgttcctagttttctcatatttgcctttggcaaaaaacacaatgctggaggaattttaagattcagtttcttaattcctctacctgggagctgggacattctctggtccactctttgcttgtggtatataatttagcagggaatctgtgcattcatttggccttgggcaatccttccatttcatcaggaacttttctaaccctcccaatcatcatcctgtttgaccttgctaaagcttttggcactattaatcattatcttcttgaaatgttgtttttcattttctttgaaacacccttgacttttaaaatgccagtggccttcagtgctccttttcttgatcattcctttttagtctcttttctatgtcttcatcagtctttcattcaaggtttggtattcctgagttctgccctccctgggtgaactcatgttttcaatgactaccaatctgttgataactcataatatttatctacactggagatcccaccactgacctccacactcatatattccctttcccatttgacatctccactcaagaaatagcaagcaattgaaacttagtagcatgtctaaaaggaaactgaatttattgctgaccacaggctacttgaaccacacagttcctcctgccttggcaaatggctctgccatccacccagtgcttaagtaactgctgcttctctttctctatgtcggctctttaaacaagtcctgtaggctttactggaaaataattatctcagatttatcttttcctttccatctccactgctaccatgtggtgtaagctatcctcatccttctcccagactctcgccctcttcaaatccgttctctgcagagcagctagagtaatctttttaaaatatagattacatcacttcactttctcatttaaatcctttcaatgactccctgttgcatttgggatataatgaaaacccttcggtggccgaggaggccctgtgttagctggctggtctctgcctgggtttccaaggtctcttccctgtctgcctctttttaaccacaggaatctctccattcttcagaagaaaccttttaccatcctaaggtcttttgatttgctggttcttctctctctgaagtttctccgtggtacttttaatatctggcttattcagtgtaaatgtcacctcagagtggtcttgtctagtgccagtatctaagctccttcttggctccagactagtctccttcacaacagtttacttcaaacagtttatcacagtctataattacttagtggtatttgtttacctgtgttttccgtagctccccatcggaattcaagctctgtgaggatagctttcaagtccattatgacagtactgcactgagctggaatggtgggcactcacctcctgcattctgaatggagacaaaagtgcctcctgctttccagaaactatgctgctagtcaccttctgtttatttttttttaacattggaagtgttttcaatgcatcctgaaaaacatgttatcacagatatgcccatgtgtgcacttataaagaaatgatgaataaaaatatgtttgggtcatagtatttccttctgtaagatataattgtcattgaattggataattgagtttatagttttataacctctcacatatactataattttgatgactgatgtttttatactttttgttattgctctttgcagttcagcagtgcagtgtgagatgcatgaatggtgggacctgtgcagatgaccactgccagtgccagaaaggatatattggaacttattgtggacaacgtaagggacattgatttattagaaatcatttgatttggtggatatttcatattaagttataatttaaggctcataaatcctgtgatcttttgaaaaaacaattttatgtagtaaaccataccttaaaactgaatttctaatttttatcctgtaagaatttttctaattcttttagaattttgtgctttagagcagtgatgttcttgaatagtaactagtcaacaactggtaactagtgctttagcaaatgtgacacatctcacagattttctgtgatttatttttcctttatctggctccataaaacatgtatactttcctgaaaaaaaaagagcaagttttctgtgatctttctttcttttttacttcttccttccctctccagttccctctttgtatctatgattttttagaacttctcaaaattaaccccaggagagccaatctgataaattatcctttgcttaaatatatttaatactaagatacagggtgatgaaatgatttttaaaaagcagatgttattgtgaaacagggagctgtaacccagcaaaactggtaccttcactggagaataccctgtatgaatcaagaaataaccttttagcaagagtgtaaggattgtagtttctggattgtgacacatcactgtggaacatttgggtaatcttctctaaattgtgggacatttttgggaattcacatattttgaagtaatgtcaccttatatgacattaaagaagtgttatttctgaaattgaatcacaaatataagtccctttttactttatttgcatttttacctgatgtagactatacgttcctgctaatcttcaaggcttccttaaggattgctggtctcttttttaaacatagaaaaaccaagtcttaggtgtaaaagaatatctagcttgttttcagttaacattattttatttttcttgcaatgaaaaatttttttaaattgttgtaaaatatacataacaaaatttaccattttagccacttttaagtgtatagttcagtggcattaagtccattcacactgttgtgtaaccatcaccaccatccatctccagaattcttttcatcttggaaaactgaaactctgtacccattgaacagtaacccccatttccctctcccctgccccgggcaaccatcatttacttctgtctctatgaatttgactactttaggtatttcatggaagtgtaagcatgaagtatttgtccttgggtgactggtttgttatacttagcatagtgccctcaaggttcatccgtgttttagcatgtgtcagaattttcttcattttaaaggcaaaataatatttcattatatgaatataccacattttgtttatccagtcatctgttgatggacatttgagttgctttcaccttttggctcttgtgcataatgctgaaatagctgtttgggcccttgctttaagttcttttgggtgtatacccagaagtggaattgttggattacatgataattgtattattaattttttgaaatgctgccatactgttttccacagaagctgcactgtcttccattcctactagcagtgcacaagggctccactctatatacttgccaaaccttgttattttctgtttttttttcttaaataataataatcatgctaatgaatgtgaagttgtacttattgtggttgttacagtaatttccaagtttgtcttgtagttaaggtgattatggtaattataactttctatttataagtgctataaagttttctttagaataattttatgtaaaataggagtatccatttaaagaaagatattctgttaaggtcaggggtaggtcaactttttttgtaaaggccagagagtatatattttagaccttgctttctccattgcaaatactcaactctgccattgtagtgcagaagtgaccatagataatatgtgaatgaaagagctaggatgtgtttcagcaaaattgtatactttatagacactggaatttgaatttcacacaattttcacttgtgactgagtattatttctttgatttttcaactacttaaaagtgtcaaaattcctcttagctcatgggaagtacaaaaataagcagtggcctagatctggcctttgggccatagtttgcagattccttgtgtgggtgtgggtggttctcaggtatgacaagaggagactgactgaagtttgagaaatggagggtgaaggtttttaagagaatacaatacgttgaggccagttttctagcaagaataggaggggccaatgtgttaaattctctaggctagggttggccaggggaggctaagaaagaactggataacagtggaacagataaatgcagcagagtttctcattccatggatgatactttttctatattttctttgtacattcaggtatttcccacattttctacaacagacttctgtttataaccagaaaagaaagacagaagtctatcacaaacacagtattcataaaaagatagattgatatatatttttaggccttagaaaagtgttaggatatctgattgccaactctgttttgcaaagtttcataaccaatgaagagacacatctatccttgttgaaacacatccttttgctctgtagagggaaaaatgaaaattagaatcactgaagaaagcgccttgccttgcctcaactgatctttcagagtatttgctcaaatctgtcctgaaattagctgtcttcagtctgaattaagctgctcttcatgccttgggcatatgtgtgtatgtatgtatgagggttgtacagaacacactctagtgggtgtgtctcttgttcttcacacaggaatgagaaggcaggggatggaaaggactttccgcttctaaaatgctttgatgttcttccgcccctgtgtcaaaccatattgatgttaccacattttccagtcagaggaaaggcaacatcactgggtcagaaaatcagcatatactgaacatttgttctctaggtttctcatgggatgacatctttcttaatgtttacctcagggataatagaacatataggggaagcaaaatgtgtagcaaacacaatttatttgtcagcaagtaagaaggtaaaggtatgataactaatagattaccagctcaaggaatggtgtaaggaagatgttttccaagtcgtcttatatagaaagagtgttacaatactgagagcaaagaagcagatggaacatttttcaatttatgaatccagaaaagtcttggaaataggatgcttgctaaaatgaacattataaaacatttagactgcttagctgctttcctggaaacagacagcacttcttagaaagcattcttctatttcatccatttcattcagcaatgttgattgagtaactactgtgaataggtaagataataccctggccacatattctggtagaaatgacagttaatactaaaaaggtaaatacctaatacacatttaggtagcgagaagttttaggagaagaataaagcagggtaagagggagagagtctgggtcaggattagcagttgtctgctattttacatcaggggtctctgagaaggtgacattgaaacacagatccgagtctgtgcctttaaatctatggaaaaattgttctggacaagtgaaaagcaaatttaaaggacctgtagtgggaacagactccatgtattttggaaaccgtaagatccatgtccctggagtaaagtggggaaagggaaaatggtaagaattgagtttggagagggaggtatagggccttgtagtaggccaaggaacaaaatttggactacagcctaaatattatgagaagtcactggagcattttgagcagtggtgttctgtgacctggttaacattaaaaaaaaatcacctgtctgctgtgttgagcctggattataacagagaaaaggaaagggccatgtaggaggctaccacagtggtgctagtgaacaatgctgcagctgtagtcgctgaagatgtggtaagtggttgtattgagcttgtattttggaggtatactctgatggaccaggcgtggtggataaaaaaaaatagaaaaagtaaaaatcaaaagtgacaaggagagggttttggtggagctgctggattaatagcgatgtcatttccagatacgggaaatactgtatagggagtgggttgggtaaggagtggtggggctgaggataagagttttgttttggattcattagattgagaaatctgtcagacttataagtgcaaagatctatgaactctgatcttaggagagaggttggacatagagatataaatttgggaccgtatagaccgaattattatatagataatattttaatcataggcttagataaagatcattaggaagttgttgtagctaaagaagagagttgaaaacagagacccaattcagcccaacattgtgagatggggaagaggaaaagaagcctgcaaagaagagtgagaaagaatggacatgaggatggaatgaaaactgagagagtgtggtatcctagaaaacgaaggaagaaggcagcaccaatagcaaagatttataccttcctatgtcagacagtaggcttttgtttctttcctcttgttaacattttaacttggtttagaatgctatttttctaacacatttgtgtagaaattacaatcatgatttcagacttgacttatgcccaagtgtctgcgcctctgctgagttgtaagggagtctgtctaataaaaatatatacctgacctgttacctggcacaaagtaagtgctcagtaaatatctgttgaataaaaatgtcctctaaatatctgagcttttacagtatgcaaccaacccacacaggaaaaacagtgtgttttctccttctaggattttggtgggcagctaagaaaccagctcatacttctatctgtagtacatcttttgctctcttgcctttcatgccactgtcatgctaggtgtaagcacagttttcttcctgagtggtcagcgttccttctgtggtggaaatttaggcattttccaatttttttctgactccagttgaaatataagttgctgtttccattcttttttgttacaaaaaaatatgttcttttgtaaaatacctttcatcataattcatttgagaaaaggaaattcaccatttttggtttttgcttctacttttatctgtatttcctgcttctcttcttttgctattgctctttaatgtaaacttcggctgctgcagacgtcttgtcttacagaacattttcgtacaaatgttctatagttaaaagaggaaggaaattaagaatgtagaataccttcagcgtgcagccactgtgcactttgtcttatatgctattttatttagtcctcaaacgtctgtaggggaggaactgttaagtctctttttgcaggccaggaagctaagaatcagagaggtggtgtggtgagtgggtgctggggacagcagagctcattatttgttcactgcaccattctgccttgcgaagtacttgaaaaaatgccgtgaaattttgatgtgcgggagtttgttgagttcttgcagtctgtcagataccacagtaggtgacagggattcaaaggcaaacagatctggcccttgtcctgggggaacccactctcacatgagagacagaaatacaagcaaatggttgtatcagtggcccttgatctttttgttcataggatccctttacattttaaaaaattattgaggtcctcaaatgtcttttgtttatatgagttccttcaatatttatagtattagaaattaaaattgagaaatttaaaatatttattgattcattaaaaataacaagaaacccatattataagctaagataaatattttttataaacaataactataatttgcaaacctccaaaaatctttagtgagaagggaggcattgatagtctaacctagacagattagattaggtttaatttgtaatgggccagctctttctaggagaaactcaaggttcatccagccttgttctacctgcgaattggaaactttgttttggaaaaccgtgggagaagcccttcctccatttaccggaggttgtgttctgagtgttacagtcagtgtggacagcttttccccaaaggctggcattgtgataagagaacacatgggaaagtgactgtaatttaaatttcctacagctcaatagcatttaaagaaaattccacacattttaattgatcacattactttggacttagtattttgcagtgcatctttttaacaattgattttttaaatctttcttttttaaaaatttaattgtattttaatttctgggatacatgcacaggacatgcaggtttgttacataggtaaatgtgtgccatggtggtttgttgcacctatcaacctatcacctaggtattaagccccgcatgcattagctatttatcctgaagctctccctccccctgccctccccagacaggccccagtgtgtgttgttcctctcccagtgtccatgtgttctcatcgttcagttcccacttataagtgagaacatgtggtgtttcgctttctgttcctgtgttagtttgctgaggataatggcttccaccttcatccatgtcgctgcaaaggacattatgttgttcctttttatggctggatagtattccatggtgtgtatgtgccacattttctttatccagtctatcattgatgggcatttgggttgattccatgtctttgctattgtgaatagtgctgcaatgaacatacgcatacatgtaggaatcttcaaatcctggcagttgtttctatggaattactgcacagaatgctctcataggttttgttttttcccaccttcccatccatctttatttttttcatgttccccgtggccttttttccttttcctttctgcttcgtatttacttatatttcaagtctgcccatatttcaaggcaatgatgagtgggaagtgctatgtaggactcagctggagataggtaaagaagcagaagggtatggttcctagggagctgtacttgtgcagagacacacagaatcatgcctttaattgaagtgtaacttatcaacaaatgcctctgaggccattggcacagtgacgctttaaggtcaagatcatcttttatttccaagtgcgttttagtcttctgaccatcatcagcagaacagaaatcactctgtgcattctggagatgataggcaatctatccggttcaacatacctgataaggaaatagcagcattactgtgctactagatatcagtatacttattgagtttcccattttatgatatgtacctcacttgaagtgtttggccccccacttccctttaatttgagtaattagtgtccttcaactccatttgtggacacaggtcatagaatataatcctctaattcatttgtgaggacaaatgtttcaacagggtgggtagatagggagacacactttcagtatcagtattttctcctggagaagatatgattcttgaattcagctgtcttcattatggatcatgggaatacttaggttccaaggattctagagagtgtgatcttttaggctgaaccgagttgcagtgcacggcagttcagtggggagaggggagtggttcaagtttactggctccctcttgggctcatggaaccctaactcctggtctcccaggtcacaaggctaaaggagcaaaagagagtgtgtgctgtgtgtttgtcagcatgactttggaaacatttggattgtgagttaattttatatgaaaaaacatattatgcttacacagctttttttccctttttttcttctatgacctgcaaatagtctctacacattggttacttcttttggcattttatagctaacgttgatggtattttccccccttttctttgttttgcccttccagctttaccttttccccccttggcttccttttcttctctgatttttcctttttccctttattgccatatcattttcattttttcttattacatttttctcctcctactccttccctgtgctaccgggatcggcctcttttttccttcatttcccatattttattcattccttaccagtgaaaatatagattatagggttagtagtacagaaattgagggttgagtagttacattctaaatgagcatgagagccagcgaatatgattctgattaaaaaaaaaacaaaaaaccttttaccaaacacttgcttaacagtgtgatttacatgaagtatgtaagtttttgtctgaatatacttaaatatatttacttaaatttaagatgtgaactttaacctgtgtaatttatacaagttgcagtttaattaacataatgtactataatttaacataagatcctttattggcagcatcactgcactactatattgtgcttggagactggctatataatgagcttcttgctatttttgtatgcagctgtctgtgaaaatggatgtcagaatggtggacgttgcatcggacccaaccgctgtgcttgtgtttatgggttcactggtccacagtgtgaaagaggtaagaagagaaatgagactttactttctgaagaagtctattttattgtaaaaatgtataattttttgctattcaatgaagattctgctaatgaaattatatttttactcttctttgattatgtctctaagttgaatggtaagattttgagacatagctaatagtggcagaagtgtctcaactttttccaccagtgaactcagtttgggcggccaactctggggctatggctctagggtaattttgagtgagtgactgatggcaaattctaataatgtgcttaattcaaattaggaggcattgttgaaagtactgcttctgttaaaaatgaaatagtgtcaagttatctttggctgcaaaccccacaaaatctgacataaattgtcctaagcaataaggaaatgtataacatttcacaacaaaaagtctcgagctagtgggcctcaggtaggatgtgatcaaggcttttaccctgttactctgtttctcttgaccctgccctcctttatgtttcactttttgtcctagcctgaacttctttgtgtttgtaaaatggctgtcagcagtcactaaggaaacatgtttcttcttcacctcttgagacagaaaacatctcctccaactgtgggccagcaatagcctccagagacactttgtacgctgcctggtttaagcttgagtttttaaaatagttcatggcaaagtggggggtggtggtggtaatatgtttgatgtagacttaccaggacctgtcgttgcagcaggagatgatttaagcttccccagagtcacatggaagggatgattgggtatctgaagccagtagagcttccttttggtaagagaaaaggggtggagggatggatgctgggtaggcatcccgcattgtccaacttattcatataaatggttagtcaagccaatgtgaaaccaatttactatgatttgaatagcagttaaactcatgacctatatagactgctgaaaaatctctggcattgatccctcattatggatcatgggaatatttatgtttcaaggattctagagagtgtgatcttttaggttgagctgagttgcggtgcagggcagtgcagtggggagaggggagtggctcaagtttgctggctccctctaggccagcggaagcctgactcctggtctcccaggtcacaagtacaaaggagcaaaagagtgtgtgtgctgtgtgtaagctatctaaaataatgtcctgatggtaaacagtttcatgacatatcaagaagttaaacttcgtaaaatgtgataaataactagcatcgagccataacagtaaaaacaaacttgagctaaaattaatattacataatcattcattgttatttacatcctcagtgcatttttccagagcttgttgtggcatcaagttatacagcactttctttattgtgaaactagaatatatgaaattatgtcaatgaaatattacagataagtaggggtcaaggtttatatacatatagaggctttgagtcgtgaaaaagccttatattttaaaaattatactcattaccctgacaaaacttcatcttgcttttcaagtttaacctggagaagaaactgagaaattacaattatatggtgaagtttgaaaagtaaaatctttttcacatacatttggatgtatatatacatcaagatatttttattatttttaatgtaattgagatttcttgggactgaagtacattccacaaatgataagagtttaatgttacacttaggatgaatttaaatgtctttaccagatgcttttatttgggaaagaaaaattaattatgaaacgttagcataaaaagataaattattcagaatggaataacacacatttcttagataacgctaagtttatttgaacatcatagaatgtagaataaatttaaaatttcaaacataatcataattggtagagatgatcttcatttttctgggagtcaggtaaactttgtagctctttcatcctgaagcagatttcaaagtcaatttgtaattggcaaagaaattgggtgagtagtttcaactcagaggcttccaggaattacgtcattattcttcaacagttattcattcattagatttgttagtccttactaaatttctgagaattcaataaagatttacatatattttacatgtacagtagcatgttttccaaaaaaaattgtaagattaattagttaatggattacccttgggatattttttaaatgttggtttgtttcttaaaagtcttattacttactactcttcagatggaagttctaaagcttcatttctttcaaagaaggagttaacaagttgcactcttacatagcaaccatgaactttaatattttaaagagatgttttaaattgaatttatacatgtataataacccattctactaaaaatgaagttcataatttttttcaagaaacattgtgtctgtgtggatgcaaaaagagtaactcacttatgttgaggttggtgagtaagctcatgtgccctgttagcgtttaatgtttatatatatatttttaaattactgaatttcaaaatatatgttctttgttatcttaataaaaagacctttgtaaaatcagagatatttgttcctcctaatgtagaacacataatttctctttaaattggccttttgggatcagtcatatgataaaacatggctgcttttctagctgtctgggcttttggcagactggtttccagacccagagactgagtagtaaccaatggctggcatgattatggtatttaacttgagtctgagtgtgggtaacctgaacttctttggagttctcttttcacacttgctgatatgtacaatgaccttttatacttagcatcaaaaaaaaaaaaaaagagttcttgtggttacaggctaattgtaaaatgcagacagctcatttgtggccatagcatatgaaggtactcaattgtttatgtatctctttccaaacaaatgtaatttgagaaaaaataaatatctcacttaatatacacttgagattaaacagaaatggagtcagcattcaatggtaagacctgatgggttttttccctaacacttaaaatgtaccttatgttttatcagtagaaacttggagagggtgggtagacaagacatagatttacctgaggaatttctgaaccaaataggtgattacttgatcgcaaatgtggcctgtctagagtccttctttcaacttttttgacttaaaggattgttgaaatcttttgtaatggaattttctttgaagtttatataaggctcatctgttagaaatatatcccagacccttttaagtaatacataaattactactacaaatggtttttatcatgtaaacatgacttccttaaaatagtatgcaaattgtgtaaaatttcaaataatctggtgcttagtaacatttcctttaaaatgtacatttttttagtacaacttaaaggaaaaagggactagaaaattatttgttaattattgacattttaaagaaaaatgacttttgttaatctgcatcttcagtggaattaaaggtgagatcaagttgcaaatgttagagttcaaaaaatctaaactttcaagcctttatgtaaaatgaaaatagattgatttccatttaggttaccttttatgaaatcatccagttatagacctaatgcgtgaacccaggtctaaaagcgtgctgagaaggagtcactccatctctgcctggatatctctagtcaggggctctcactcactcaccccatcatgaaacagtcctgctcatcatcagagtcctgcttgctggaactctgcattattctgctgctgtccaaccaggacatttagcagatgtgtaagatcccatatagtctaattcagtgggaagatgatgatgacaacttctctgaaaggagtcaaccacaacctgccactcaggtgtgcatgctggcaacttggcttctaattataaactctttaattattgtatacatttttatttattcacccatacttcaggaagtaaagtaactgtagtagccattaaatctacttagaccttacccaaatcctccaagagcaggtgtaaagatggacaaatttggattttcctgaattctgagaataatgtagacccagactcaagttcgtttagaaataactgatatacttgttaatccaatggacttggaatgtattataaagtattcagggtgactgtacagcttatgaacattcaagtaacatagcaaattagtagtatgaccaggaatatagggaatatggtgacgagaacaagctggtattacatagaattctatacccagtgaatttgatactttcaagaaatgtataaacaatgtttttaagaaaataagttccattgtaattttctgttttaaaatgtcatgcatgtttattataaagtaatttagaaataaaacaagatgaaagacgagaatctaattactcataattcctacacttaggattaattaccgttaatgtcttggagactataacgtacactgcacgttgtaataacacaaaaggacaagcaagatataagagtaagttatacgtgctttggggtgtttacttcaatttacctttttaactacaaattagaatatacaagagtgtaactaaactaatttttaaatttaaatatttaatatttattcatccaatatttgttgagtactcttacagtattaggctaagtacttggaacttgagttataagaaaaaccaatatatacttcttattaatgagaagcaaattattgaaaaactagtcatctactttacacatgaggatgcaataagacacagtaaataccgtaataggagtaggaacaaaaagtaagagagctcagaaatgctcactaatgcaggacaaattacaaaagtctttctttcagtcaaatgaatgtagaatgaaaaaacatagcttactacagtgggaaaaacagtatcagactaattcctgagatatatcatgattaaatcttatactaatgttatttaaactccataattcatgaccaattaccctaattactaagctgatatttattttgcagaaataaaatgtctccctttttcttgcactctgaagatttagtagaatgaaaattacaataagcagagagagaatgttaccaactgcagatgtcagactcacatgtaccctcaggcacacacacacacacacacacatttctgcacttgtgaggccgttaagaagagcattttataaccttgcactctctaagctaaacttagccttaaatgggcatcagagaaataccaaaagatctgtgggaacttaactttttggcactagctcagttgatacccttatcttgaatgccattaagaacagagggaaagaaaattagagaaggaaaagcagacagtgggaagtggaagaaaaagaggggaaggagaaaatgaagactgataagaaaagagagatgtaatgctagaagagaagtggagacgcttggtgttgtataaaggaaggacttaaatcagggagaaaaatcaattcactgattgatctacctgggagaggccaggctttcacttcttaatccttaatttaagagtctgctgtttagatctgtaaaataagactgaacttttggcagcccagtagatcctgatattttattctcttttgaacaaaagcagtgtgtatctcatttattccagctctttctttgattttggtttatctacctacaggcagggaaacctgcaatataaaatacaaaggctagaatattttatatttttaactccataaatattttttcttgttttcctgtttcaacatcggattaaaagacattagaggttaattggtgtagaaactgggaaaaactaccagacacacacaaattaaatgtaatcagttgttattatatagaatttactcaaaagtaattaaatcagatgtgcatgtatatgggggaagttatgtaacaaataccgtatatttcaaaagttacaaattcttaaataacacctgtctccaggggtttcagataaacagttgtggacccataatcacctcacagattcgttggaaagattaaaagcaataatgtgttaagcacctgacacacaataggcagtgtgcctgacacatggtaagcttccactaagtgttacttgttgtatttttagaacacaggctgtagtcaaaatcaaagcttaatattaaaacctatgtaactttagaaatgtgattgccctatctgatgcctgtttgtacatatataatatatatctattatgttaactttgaatcatttttgtgaagattgaatgatataatgcctggcatccaataaatgaaataaataatggtcattaatgctaatatcgttttaagaggactccccagttatcaaaatgatagatgtggtggctggttattagaaatagaatattcgaaaatggactctcaaatgggagaaaaaagaatgttgcgacctatttaagtcatacaaataaggcttgatgatgtttttattgacagtggaaagacttagaataaagtggatactttaagagaagttcacaatcctgagatgagatttaaacaagaaatgaagtgccgtggcctgtgtctagcacagagttaactgctcaataaatgatcagctataatttaaaaattaagccaagatctgatatgcttttttttttttttttttttttgagacgggttcctgctctgttgcccagggtggagtgcagtggcgtgatcttggctcactgcaatctccgcctccccggttcaagctattctcctgcctcagcctcctgagtagctgggattacaggcatgcgccaccacccctgctaatatttttgtacttttaatagagatggggttttgccacgttggccaggctggtctcaaactcctgacctcaggtgatccacccgcctcggcctccgaaagtgctgggattacaggcttaagccactgcgcctggcctgatatgctgtcttagataaaattgtcctaatgggtgagagagagactgtttcaggatctctgggacatcagttgtgaacagcgtaagtttcactattttaccttttgtgggatttttggtaacggtacagattgactggaaaatattgtatatcattattatgaccttgtttttatgcagttgaattagaccctacttatcttgttttgacatgtttttattgtaaatgtcagtgttcctattagtactcattacttaactggtcttttgaaaatgtcttagtttgcccttttcctatacacaagttattattctaaacagtttatagtataactcatatataggtagagtttacttaagccaagtacttgtaatctatagatttgcatattgctaaatctgaatgaagaagtaggtcagagagtttttcaaacagtacagagaggagtccatctgtgatactttctttgaccaccctaccttcctacccccatcttatttattgggcaaaactaaggcagtctgtcctgtccttttacctgccatatatccattcctctagaatagctcttttcattgtgttgtgactgtgtatttgcttggctgtaggcctcttaagagcagagatacttttctaaaattgcctttgtgtttcttatactccacacagtgcagcataatggaagacgcatcatacatgtgactgcataaacatgggggattccaagtagaagaaataggatgaaaataagtatagagataataaaggtccttgaatgttcacagagattaatcatttcgtgtggttgtaatacacagttagtgaaaggaaagagtagatgatgaggctggaaaaatagacacagaccttaatttacaaagtctgaaatgctggagtcaagaggctgccctctataccctcaagtaggcactgagtagaggagctatgaatgacttgtatgcttgaaagcagttctccacaaacgtcattctggagtggcaaacaaaatagaatgaagggtggaatctcttagaactcactgcatgtctgctagattaaagttgtataatatttcactaggattatgatttatgtgtacaaaacttagatttttaatataaattggaaattatataatttggagggaagataacatttactgaacttttactatgataaatactttagaggaattaatatttttaacaacccaaaatattttttaacataacaccatgaataaaaaaatggaggtataaagaagtgaagcaattttctcatgttaactcagctaataagaaagtaggattggaacactggtggtataacctcagaacccatatacttagcctcaactttgattctagtgaaacacgacattgcaaaaataatgtatttccactctttagaactatattgtgtcagttcaatatgagtactgataacaaggcacatgataccattgaattaaagggatggcttgtcgtttggggattattttcttatctagcctagggaatacacacacatatatatgtatttcagattatgactctgaattcataggctcagaatttctttatgtatataatctaaaatattcaaaactcatagagcttaaaacaaaattcagacttctgtgtttagccaagatagactaacaggaataaattagccttcctgcctgaaaagaataaaacacagaacagaatatatgaaaatgtggttttcatgatattggacactaagcaacaaaaaacagtgacccgtgagagaagggaaacaacagtgtgaaccttttgacttccgcagcttgctgcctgaaagggtttttccaggttgtgctacaacatggaagtttgccccacctgtggctcacaggcttcatgcagcccaggagagctttgaatgcagcccaacacaaattcgtaaactttcttaaaccattatcagggttttttttcttttttctttttttggtcatcagctatcgtcagtgtattttatgtgtggcccaagacaattcttcttccagtgtggcccagggaaatcaaaagattgaacactcctgtgctacggggtgagaaaatccaggcacggcctagcagactccctaagttctggggagatcaagatggctagagttctcagggcagaatcctggtgaggaaacagatatatagagagaacttgtgacatctacagaggctgtctctcaagttttcagcagaatactgacaatcacattcatgtgaggaatctttctgagactggagaaggaactgcttgaaaggagtgaaaggaacaatactcagagttgcacataagcctggaaatactgccttcctctctaaccagattagagggtcacataattggtggggtattggttagagtactcagaatagtgttgcctcaatagtggagaacaattaactatagactaaatgctgctctggctgtggagaataaattttaaaagtaacagctaaaaggatcaaacatctatctagaaagtttaagaatatttataagaatacaaaaatattaagcactaaataaagtaaaaaaaatcccaatacatggtatctaatcaaatatctgcaatcaaaaattttgtgtaaagaagcaggagagcatgatcaaaatggaaaaaaaatcaactaaaattcaccccaaactgacaaagatgttagaattaacagactggaagatgaaagtagttattataaggtattccttatgtccctaaagttggaggaaagattaaaaatgttaagtagagatgtggaatccaaattgaacttctacagatgaaaactacaatgtctgaggtgaacatttttctggatgggattaatgggagatgagacattataggcgaaaagacgagtgagcctgaaaacatagcaacagaaattatttgaaataaagcacaaagaaaaaaaggcttaagaatgtaggagagcataagtgagctctgtgacaactttcagcaaactaaatacatatatttagagttagcaaaataatagatggcagaaaaaatatatttgaagaaataatggtcaaaatttttccaaatttgataaatgctataaactgacagacccaagatcaatgaatccccaagcaaaagaaacttgaagaaaattatattaagatacatcataatcaatttctcaaaaccagggatacagggaaatcttaaagtagccagagaaaagagatacattttgtatagaggaaaagaagataaaaataacaacaaattatttgtccaaaacagtacaagtaaaaaggaaagtggaacagcacatttagagcactaaagttgaaaaagacaattctctgtctaggcttttatatttaataaaatgtctttcaaaatcagaagtaaaataaataaagctttttcccaatatataaaagggaagaattcattttccagtcacctgcacagtaagaaatattaaggcagttctttaggctgaagaaaaatattgccaaatatttttgaatattctttgaaaaatattgaaaggaatgaaaagtatcaaaaaacgtaactatgtgggtaaatatataatacttttccttagtattttaaatctttttaggaaacaattgactgaacaaaaattaattacaatgtcctatggggtgtagagtagatgtggtggtaaaataataaaacaatacacagaggctgggatgtgcctatactatatgtcaagaattatgttacttgaagatagacattgataagttaaagatgtgtggtgtaaaccttagagtaagcactaaaaatacagagtaatgattaaaaagccaacaaaaggtgataaaatggaataataaagaagaaagcaacaaaagaaggtaagaagaacaaatgattaatggatagttagaaaacaaatagaaagtggtagattgaaacctagccatgtcaatcatcacaataaatgtaaatggtctcaacactccaattgaaagataaagattgttatgtaggattttaaaaatccaattatatgctgcctataagaaatctattttaaatagaagacactaatggattaagacctaaaagatgtaaaaagaaataattggctaatagtaatcaaattaaagctggagtagctaagttaatatcagacaaagaagatttcagagcaagtaatagtatcaggcataaagaaggccatttcataataataaagcggtcagttaatcaagaagatgtgatggttctaagtgttctctcacttaatagcatagcttcaaaatacatgaaataaaaacagaactgcaaggaggtgtagacaaatccataattaatggagatttcagtaccccctctcaataattgagagtaggtaagaagtcaatacgggcatagaaaactttagcactgctgtcaatctacttgacctatttaatatttatagaacactttgccacacagcagcagataatatacattcctttttattgcacatggaacatgtagcaagaaagatcatattaaatggatattaagtagataatgaacaactcaaaagcaaaaataaggtaaataatttcttgaaagacatatatcgccaaagctcaattaagaatacaggtggccttttgaatccatgagttccatgcatgtggattcagccatggatcaaaaatatttgaaaataacaataaaaataacagtacaacaaaaaataatatgaacttaaaaagtttagcagtaagacaaccatttatatagcatttaccttgtattatgtactattggtaatctagagcttatttaaagtgtatgggtgaatgtgtgtatgttatatgcaaatactacataatttttttatcagggacttgagcctctatggatttcggtatctctgggcatcctggaaccagttccctgcagatactaagggactgctgtaaataacatgaatatccctgtatcaattaaataaattgaatgtgtaacttaaaaccttctcatgaagaaaactactggcccaaaaagctttactggtgaattctaccaaacatttaagaaagcaaaaataccaattctatgtagatttctctagaaagttgaacaggagttaaaacttcccaactgcttctgtgaggccaaattaccttgataccaaaaccagaaaaagacatatcaagaagaaaacaacatataaatatcaattatgatatacaatttctcaacaaaattttagcaaatgtatcaataatatggtaaaaggataatagatcatagccaattgagatttatcctatgatattaaaaaacatcgtgtttcactatatgaacaaattctaaaaaatcagagtgttcatctaaatatagctgacaaagcatttgacaaattctgatgccaaaatctgttcccaaaacagtcagcaagataaagaatagaagagaatttcctcaacatgaaagaagggcatttccaaaaaaactgtaatatggtgacaaagcaaggatagtcactctcgtcacttctgttgaacattgcactgtttggtcctagcaatggcaataggcaatacaaagaaatgaaagtcatgtatttggaaaggaggaagtaaaattgttttacttgtagatgatgttattgtctatgtagaaaatccgatggactttacaaaaatctactggagctcataagtaagttcagcaaggctgcaggatacaaactaatggcagttgcatttccatatctaacaatgatcagttgaaaatctaagttgaaaacaataccatttacatcatcttatttattatgtaatactcatggataattctgcaaaagatgcagaagcccatgtgctgaaaactgcaaaacattgctgaacaaaattaatgaagacctaataaatgaagaaatacatatgttcattagttggaagactcaatattgtggggtatctcttctcccaaaattgttgtatgaattcagcataggactgatcaaaatcacagcaaaagtcttaccaggaatgtatgaagtccagtagagcagtatctcattgtgattttcaatgtcattcatcattagggaaatgcaaactaaaatcacaatgagatgtcattctactgtatgcattgcttgtaagaaagtacatggtacaaccatttttgaaaactgtcaagtttcttaaaaagttaagtatatgcatatcatatgattaggctatttcacgctttatttgccccagctaaatgaaagcttatattcatacaaaaacttgtactcaaaggctttgtagcagccttatttgtaatagtgccaaactgcaaacaacccaaatgcccatcagcagataaatcaagaaacaagttgtatattcatacagtgcatacaacggaatatttattgtttgttaaaaaagtaatgaattatttatatgtacattattgatgaaccttaaattatttaggctgagcaaaagaagacagttgaaaaagagtaaatacattatgattttatttttatataattctagataattaaaactactatgacgacttgcagagtagtggttgcctagggatgcaaaggtatggataggcaggatagaacaatgacacaggaacaggtggtaacttgtaagagtgaaggatatgttgttatataggttgtaatgatgatggggttatacatgtataaaaccatacatgtacactttaaatatatgatgctgattgtatgtttattatacctcgggaaagctgttaaaaaattgaacaatgaaagtaattgtttctccttttgtataagttggtttaggttttgggattaatgcttctggccacatacactttttttctacttgtggttagggaaacacagtgagggatgcttccagaatcattgtgcacatcttttttgggacttctatttggggatattgagaaagtaatgttactaattattgtctgcataatcagtatgagtttttcaaggagcagatggccattgtagtagtctgttctgccactgctaataaagacataaccaagaatgggtaatttataaaggaaagaggtttaattgacacacagttccacatggctgggaggcctcacaatcacggcagaaggcaaatgaggagcagaatcacatcttaaatggcggcaggaaagagagcttgtgtaggagaaaacccctttgtaaaaccatcagatcttgtgagacttattcactaccatgagaacagtatggggaaaactgctcccataattcagctatcttcacctagccccgctgttgactcatggggattattacaattctaagtgagatttgggtggggacacagccaaaccatatcattctgccccgggctcctcccaaatctcatgtcctcacatttcaaaacacaatcatgccttcccaacaactctccaaagtcttagctcattctagcattaacctaaaagtccaattccaaagtctaatctgagacaaggcaagtcccttctgcctaggagcctgtaaaattgaaagcaagttagttacttcctagatacaatggttgtgcaggcattgggtaaatacacctgttccaaatgggacaaattggtcaaaacaaaggggctacaagcctcatgcaagtctgaaatccagtggggcagtcaaatcttaaagctccataatgatcccttttgactccatgtctcacatccaggtcatgctgaagcaagaggtgggtccccatggtcttgggcagctccgcccctgtagctttgcaggttacagcccctctcacgctgctttcatgggctggtgttgagtgcctgtggcttttctaggcacacagtacaagttgttgttggtgaatctaccattctggggtctggaggatggtggccctcttctcacagctccactagacagtgtcccagtggggactctgtgtgggggctgcgaccccacatttcccttccacactgccctagcagaggttctccattagggctccacccgtgcagcacacctctgcctggacatccaggcatttgcatacatcctctaaaatctaggtggagttcccaaacctcaattcttgacttctgtgcactcacaggcccaacaccatgtggaagccaccaaggtttagggcttacaacctctgaagcaacagcctgagctgtacattggccccttttagccacagctggagctggagcagctgagatgcagggcactatgtcccaaggctgcatagagcggggtttgagtgtggggggcctggggaccaggcccaggaaaccattttttcctcccagacctccaggcctgtgatggaaggggctgccatgaaggtctctgacatgccctggagacatttttcccattgtcttggggattaacatttggttcctcattacttgggcaaatttctacagctggcttgaatttctccccagaaaatggtgttttcttttctatcacattgtcaggctgcaatttttttcaaacttttatgacctgcttcctcttgaatgctttgccacttagaaagttcttccaccagatatcctaaatcatctctctcaagctcgaagttccacagacctctaggacaggggcaaaatgctgccagtatctgtgcatatcaagagtggcatttactccagttcccaacaagttcctcatctccatctgagaccacctcagcctggactttttgatcaaatccattcaacaagtctccaggaagttccaaactttcccacatcttcctgtcttctgagccctccaaactgttccagcctctgcctgttacccagttccatagtctcttccacattttcaggtgtctttacagcaccaccccactatctgataacaatttactgtattagtagtctgttctcatgccactaataaagacatacctgagactgggtgatttataaaggaaaaaggtttagttgactcacatttccacatgtctgggaggcctcataatcatggcagaaggtgaatgaggatcaaagtcatgtcttacagacagcaggcaagagagcttgtgcaggagaactcccctttgtaaaaccatcagatctcctgagatttattcactaccatgagaacagtatggggaaactgtccctgtgattcagttatctccacctggccccacccttgttattacaattcaaggtgagatttgggtggggaatggccaaaccacatcagctgggaagtcaggaaatgtaactagaaaaatagtcagggtatgtttttataatttattgtcctatcacttcttctcaaagagttaaaagctaaatttatgttgaacaaagaaagtgtcatagcacataaagaagaggaattttctgcctgcttatttttgttccttgaaagcttttcttcttacaaaaattagtgcaaaattttttaaaaattattattttagatttactttcaacattatataaaccacttcctaatctcatttgttttgtaaaattttaaaatctgattaaaatacttaggccacaatttcttgatttaccaacattatacaatctcttttatctctccaccataaggggagtaagtatgatatcttttattgttgctttttttcacctcacctatagattgattcaatttttgtcaagtgatttttctaggctctgcttgagtgccttcttattgtgtataatgttgatttgttgctttatacttaaattccaacttggataagtttaacttgggtgtttgtacctttttcccttcatatttctgtatatatgatccaattatcttctgacattgaatgtgttgtggagaagtctgactctagcctgatttttcttctcctaagtcacttgctgttttttcctggatgctcaaagagtttttactttataattattttttttttttgttctgtataagttttagtgaaaagcatgtgatcatttgattggaatgatagacttcttccttaattttggagaaacgttctattgtttctttgagctgtttgtacctttttccttccatatttctgtagataggatccaattgttttctggcattgtgtgtgctatgaagaagtctgactctagcctgatctttcttctcctaagtcacttgctgttttttcctggatacccaaagggtttttactttataatcatgtatatatttttttctgtactagttttagtgaaaagcatgtgatcatttgatttggaatgatagtcttcttccttaattttggagaaatgttctgttgtgtcttcgagtcatttttctccatttttaggttctctacttcaagtatattgatttctttttttagacttttgatcttttatccactctttacttcttttgatctttatcagtaattctttttagcagtgtctgttctgttgtttttgccaattagtgtaatggttttataatcatataagatatcttactttgtttttagtttatttagaagtttctcttttatttcactgttttgtttgatcatttagactttatttagcccttttgttactgaattcatttccttatatatttattaacaaatagctttgtaatacaaagaaatcatgcataattttcttttgttttctcattattttttcctacaatgcagtattcttttcttaatctgctttgtgtattaggaaaaaattatagtatggtacatagttcccgacccatttctttctgtcttctgcttccttgaaatgggcttttgcattaatttggtatagatgaatttttcttttctccctttcagaattacctagggattgttttccttccctagctcctgtttgagagccaggtatttcaagtgcattatgttctgagcccctatgaggaaaggaagagcacagctgggatttgggcagcagtgatgaaaggatctgagctctgtactttctcaggttattcttcacatattttgtgtcaggatcactccctcttgtcatggaagtattctttttcaaagaggatatccctgaaatttgaatgattgctcccatttcagctacaggacctgatgcaccattgctatcagaaaatcttgcttggtgttagttttctgtatttgtctcatcattcctcagcattagtctgtcttccttattgtgattgtaaggggcttcaccccagcctgctgctccctgagaatcctttgttcttatgttctttgtgcttaatgctgaggataactaaccctgtgtgatgatataattctgtcttcactgtccagttttctcccatctggtagagatcacaatgactgggcctttctgtttttttatttttgtttttgtttttgttttttcttcgaatgcgatgttatgtgggtaggtagggattttagtcctataatttttaactaatttatccataagctaaagacgaactcagctcttcagaaggaatagtcagatttcggccgggcgcgatggctcacgcctgtaatcccagcactttaggaggccgaggcaggcggatcacgaggtcaggagatcgagaccatcctggctaacatggtgaaactccgtctttactaaaaatacaaaaaattagccgggtgcggtggcaggcgcctgtagtcccagctactcgagagaggctgaggcgggagaatggcgtgaacccgggaggcggagcttgcagtgggccgagatcgcgccacagcagtccggcctgggtggaagagcgagaccctgtctgaaaaaaaaaaaaaaaaaaaaaaaaaaaaaagaattgtcagagtctcatcattttcattccctatatcatttgagggaagaggggttatgacactcttccgtttcattccttgtctgttgtttttcaaacatgtcaggaatttgggcatatttcttctttagctgctgacagtaaaagtgttgttagtttcatttgacctttgttgttgttgttgttgttgttgttgttgttgatattagctgtgggaaagggagactctgtgatatggttttactctactgtattttccaggaattttttttatcacatttaaaaagtttttgacctgaaatctatctaaagtcacacagaaagccaggaggaggggcttccaatcgaagatgatatagtttgtgatactgcagctgacatttaagactaatattgttgcactttattaagtgcatattactcaatcaagaaacgttaattctgtgggtgcctcatcttctgcgaattaaagactgtgtttcccatgaccatacttaatgtcgtggtttaatgcatgcaaactttttgcatatgggcaaagccttatgtttgtgaatgtcttcatctgatttagaaatagcacacaaagtacattccaaatcttgaacaagatggttttcatcttaaaaaaaaaaagaattaagttctgaatgtcacagtagagagtttagttagaatttaacagattactgtgttcttgagcgtgtcaatttacaagtaatttcttgtttgaaaaatgaggacattgggctagatcagtgtttactcatcttgcttggtcataagaatcaccagagtatttttgtcaacagtattgattcccacatctgttccttggagattcaaattcagtactctgaatacagtgatttgcaaccattgttgcttattatcatcaccagggagtttttaaaaatctcggcactcaggcttcatcccctatcaattacataagaatctctggagccataggacccatggccaaacattagcattttttaaagcccgcgaagtaattgtgctataaggtgaagtttgtgaaacattggtatagcatgaggcccttacaaagtaccccagggcatttttataattagctaggcttaagaaatcatttattaaaatatctctaatattttatccaataattcaattttcacattgaatagtgcctaaaatgaagccactctgggtataatttactactagattattttgaaagatttataatgtcttaaaattctgttaccagaatagattttgcctctctctgatgaggcaacgctggatttggaatagtcaactttatgttaaggttttctccatctctcatacttttaaatcccaatgtaagaagtacatactccctgcagggggcaaaattgagccaagaatgtttataatagcttcgaatcttggcttggttactatgtggtaaactaagaaataacccaaataaactttaaaaataatatgtagaatgacttgtaaatgaatgggaagctttatctagttttttaaaaaggaaaatcctactcgtttgaaggaaattaatgacaaatcttgctaaaactaaatctgtatcttaatcagttattacattatagatttgtagattatagtaagattgtagagatcatagtgaaatatataaaggaatgtaaccctgcacactttttaagtactacttatataatacttctctttttagaataattactgacattcataagtattcatttcttatttcacagttatgtattttctattgtttatgactctacaaagctataaataagtatagtttatttccctgcatttgagtgaagccagaggaacttgagctctctcttgtaaaaatataaataatttgtgaaggaggtggtgtctgaagagtcgtttgataaaaagacagtttgagggcttggttggtgctagggaataccaaggtccattttttcaggcacagagcacttgaggataaaaacctagagctgaactagacaagatcaaagaacagctgagcagataatggagaaggagttggaggagtgaggaaggtactttgggaaatcccagtggaaagtgctatattcattaattatcccgtgactggtgagatgttggagatttttgcttccattggctgttatgtatgaacaagaaaatatatgagattttgcataagccctagccagactcttcagtaacttccaggtccctgtggggccatgcaagaatcactttgatggtgtcaaccttcagaatggtttgggtttgaatggtcatctctttctggagtccccaaaggaagcaaatgtgctctgccctctgcattcccagtaatgtgtctgacacactggtccaactctgggctctgccatgcctctctcctgcctccctctgatgtctcacagtcctcctcaggacagaggggttgggcttccttttgcttttgcttttccttttcctagtttcaggtgggtgtcagaaagggataaattggttgaggcatgaggggttctaaattgggagttatttcactaagtatgttctggcatatataaagaatttggtacattgcatgatacaaatggctaataatttttttctgttacttaactagaattatgaaacaaactctcctaatcattcagttaaaactgtttggagattttgtgttaattattttaactatcacgttaccaggaatattgaaatatggctccacctcttccactagctcagagacatcactgtgaactagaaaaaacacccccttttaaaaacactttattgccagaaatttgtcatgataaaacatagaagtctagatcgactatactttgaattacctgtgcctggagactgcagtatgcctttccttttacgtgctggttctggatggttcaggccactttcttgagtgttacgatgacaacaaagcaaatccctaaaattacttaaccactttgtacaagtttgaagtggacttgttgcccccactattttgttcctcatccatttgggattagatttgtgatgattatcaaaccagatcctagaaattcagctcatagttcaaagtggcccaagaaagtgtaatccacaaatctctgaggatctaggatttctggtgtgtactcatccatggtacatccacatgtgtcattgttaagttttcctaagtctggtgtttggtattccaggtgttgacatgtcatcaggctgcccttcattataactcaaaacaaggaacctatttctgtacctcactcccatctgttgaagacacttaggaaaggatatccttcagtcttaaatcattgttcaatttgttctttttctatttctttctttcatggaatatcttttcatttatatttttaaacatttatttcaacaatgttttatacatttcagagtatagtttcgtacttcttttgtcaaatttatttctattttattctttttagtgctattgtaatagagttgtttcagttttatttttgaaacatttatttccagtgtacagtaatgcagttgagttttgtgtattgatgttgtatcttgcaaccttgcagaacttgttaattctaatagtcttcaatggataatttaggattttacatgtattatatattaaatatattttttcataatgtatattttataatatacatgaaatgcgtgagtgttgccatctacaaatagagatggttttacttctctcattccaacatggatgctttttcttttcttttcttgtctgattctggctggaacctctggtacaaatgttgaatagaagtggcaagatcagatttccttgtcctagtctgatcttacgcggaacgtaacaagtatttcaccattaaatatgatattatctatgagttttttgtagaggccctttattatgctgaggaagttcccttctactcctagttttttagtgtttttattatgaaacttgttcttttctgtgtatattgagatgctcatatggtttttgtcctttattctgttgatatggtgtattacaatgattgatttacatatcctcaaattccttggattaatcccactgggtcgtggtatataatcttttttatatattgttggatttggtttgctagtattttgttgaagatttttgcttttatatttacatagaatattgtctgtagttttcttttcttttgatatctttgtatgattttggtatcagtgtaattgtgacctcatagagtgactggagaagtgttctttcctcttattattttggaaaagtttgtgaaaaattggtattgttatttaaatgtttggtagaatttaccagtaaagccatctgggcctgggcctttctttgtggatagtttctctatccctaagtgaatccctttacctactataaattagtaattagaaaataattactcattaattggaaaatccaattttctaattactctagagtcactgttggtaatttctatctttctagaaacttgtccatttcatatgtctgatttgttggtaaacttgttcacttcatgttcagagtattacttcattatcctctttatttctgtaaagtcagtaataatgctccctctttcattgttgatgttagtataaataatttgagtcttctcttttttatagaggtggggtcagtctagctaaaggtttgccaactttatctgccagagaaccaccttttgattttgttgatttttctcttacttttctattttctattttattagtaccttctctgatcattattatttgcttctttctgattgcattaggtcaagttagcactttttccagagtcttaaggctttttatccttaattgttatgataaaaagtcagctgttgacagttgtctttttgtctttaatgtttttactgtgatatgtctacatttggatatctttgcatttttactacttaaactttgttaaacttcttggaggtataaattaatagtgtttcatcaagtttggaagttttctgctgtttctctgaatatcttttactgttcttttcctcctcttcctctggtatttcctttattgcgtatttttggtgtgcttaatggtgtcccacatttccctgaagctttgttcacatttcttcattcttttttatttttttcctctgcttttcaaattgtatactctctatagatctatcaccagaaattcactgatcctttcttttgcgagttccaatctactcttgattatctccagggaattttttatttcaattattgtactttctatctccagaatttctacttggttctttttatagtttgtcttctcattgatgatattctcactttgacgagacattgtcagtaaaccttgttttttcagcatggcttcctttaggttttgggacatactcataatgactgctttgaggtatttgtctgttaaggctggtcctgagttctctctaaggacatttctgttgcttgctttttttcctgtgtactatggacacactttctgtttcttcacatatcatagtttttttgttgaaaactctacattaaaataagatactgcagcaccttttgatactgcccacaccccagggtcttgatactattgtttaattattttgtttagtgccttggctggacgatcttagtgaagtctgtttcttctgcagtggaaagcctttcatgctgccccccagaggcacagtcttgaacatgtgcccagttaacctgggatgacagtggttttaacagtgctctcttttactgttcttgtccctgatctgttaagctgttggcttctgttagtatcacacccatctgttaggcctcactaatttctgactgatttcttaattgtttttttacaatgccctggggtataaattgctccatagtctgatccagttaaatccaggaccctttgcaggataaatttttggggccagcctttgagcctctgactccaaaaagacttcttagctgtctctttctctaaactaactggccatggcttagctgaatgccctcataaagctaccagcctccttttaattgcctaccatcaaaatctccatttccaaagcactttcagatttgaacttccctactttatctattttaaataaagtcagttcctttggaaagagtttcagaggtctttcttcttatgggcctgcctttctctttgggtaaaatctctgagccactcctctggactgaaggcggagacaatggtctatcttggagtgacactgctgctttataaataggatgcagggtagggctgatcacctctagtcttcttggcttgcctctcctctgaaatatctgtgtctccagcttaaactgagtcacagacccatatttgctattgcttgcgtaaacaaagctctctgtctcgcagaaaccttgcatatgacatgtcttacattgaacctgctgtcatcccctggttttctctctgtattccttatgtcagatagggtcattagcatttacccagttatccaagctaaaaacctcacagtaattcctgacacttctcactcctccaccataacagatctgtcaccaaatcttgttattcgacctctgaaatgtcacactaatgcataccctcctcttcagtatgatgctaatttagccctagttgaggtctttttttctttcttagaccatgtagcagtcatccttccagtatcacacagccttcagagtttattttttcctacattcttctcagttaaagaatttttgaaagtgctaacataaaatattttcatggatttcctgttagtatataataaagcccacatttcttaacttgatatagaaggccctttatgaaggattataccccattaatatttctgaaccctagattgtaagtgaggataatatgcattatgggagttgtgaggttttgatggcatgatatatgtcaagtgcttacccagtgtctgaaacactgagtgctcgataactgttagctgttatcatcattattattatcttttctctctcataactgaaaatgtcttcagcctccccatccctaacacatacacaactccagccacagtaaactgattttttgttttttcccaaatacaccttcgcttttcaccccatagctttgtacttggtgccatcgctgcctggatttcccactggagtgcatcatggttgtaactgaggattgagagtgagtccccctctcagaatccctcattacacttactgtgtacatctagcattcagtatttctgtatttgtcactgttcttgccttaacagactgtgagttcattaaggccagtggtcatgttttatttgcctttgtatccctagatctctactaattaagatggataaagcctcgtagcacttgcccaggaaatttttgtttaatgtacatttatttttattgctagtctttgtattctttttcattatatggttttgcactgagcattgattttttttttacgctttacactttaattttaattcaaaataaagttttatctaatctgccagtttcccccatatgccaataggtatttctttcttcccttttttttttttttttttttttttttgagatggagtttcgctcttgttgctcaggctggagtgcagtggcacgatcttgactcaccacagcctctgcctcccaggttcaagtgaatctcctgcctcagcctcccgagtagctgggattacaggtgcctgccaccacacccagctaatttttgtatttttagtagagacagggtctagccatgttggcaaggctggtcttgaactcctgaccttgggtgatccacccgcctcagcctcccaaagtgctgggattacaggcatgagctaccgcgcccagccagtatttctatattttaacaaaagtttgaccctgtttattaaatgttgtaaaaggtctctgatgtcatggaaatagttccatgatagttatgtagctgcctctttgtgcagaataggtgtgctctaattcagaggtctccttaatcatatttattacctacatggctcatttccttctgacttttagaaatagtaggctattggacagtgaaaaagaaaatgattcttgggactgggtgtttaccctcttttaatgaggattatcttgggttatagtgagtaataaaactatattcaaggaagagcaagaagagttctgagagaagaaaatagattgaacatatattaatactattttcactgaataattgcagaataatctgcaaattatgaagacacacaagcaccctcagaaaggcactggaatgcctttctaactttgacaaagtgagagggagggaaaacttaaccctcatttaggtatgaatctcaatatctttaactgattttacaaaaggagaaactatattcaaattatagcataataattaaagagaatttatagatcatagatcaaaatcacaaaatggtcaagctgtttattagaaggagtttgaaaaagagagaatagctcaaaaaagtacctcttttaaaggtctttcattaattgccccaaacgaatataaatatttgaataattgtggttctggttgaagaaaaatgcccatgatccaaagattggccattcaattttaatatggtgatatatttcctttattcatcaaggtagactttttgttgacttgtttttgttgttgcatttttcctctttatgcttaacatgagaaaattaccctcttcagattttggagcagctatggaagaaataaagttaattctattaaagagtaaggagaagcttttctatcaactaagtggcagcattgtgtcaaagccgtaagcttacagtgggttgtggtagtgtgaatgacaagctagccctggcagtcttctgttgctccacttcctgtgtagacaaaacgtgattacttcctaagctcagttaccatctgaccctgcaaggaaggatgccagcactgtttttgtcagtaacctgcctttgttctccatcagttacagaatcacaaggtctatcactgcctggagaaaagtttacaatgttctaaaaagctcttattgcgttacagaaaagttgtctgatgaagaaaatcctaattatacttttgaaagtaaatggcttgctgtccttttcaaaagtttttcaagcttttaaaagccagttttaaagctagtacagactgtgtgtgttctttcttaattgtaacttgaaaaagaagtcctttccttttttagaaaattaattttctcgtctccttacctgaaaatctgtaacattaggttttctctgttcacatcatattatgtttctctgaacttaagatgctatcctcacaagttaaacatttggaaaaattacatatgatgaaggcttttctgagtattgggtcaaataacaattatggaaatagatcagagcaaactcaagagcactctgtacttggaaggaaaaaatgcattccaaaaattctgcattactggttaagaaattgatgagtaacctctttgtttctcatacaagccactgatcagtaaagtagaaattttactatttattgttcatgtatttgttactgctaatattaggaacaaaaaagagatgaatttattttttagatttcagcatttatcattaagaatttattgaacatgtgccatgtgccaaacactttgctagatgctcagtgttttccttgttctaaaattaaattttaaaaaatcgtattaactggaggtaaatggatagaattcgaaataaaatatgtgtcccttggggacataaacctgtgtaatcacttatgcattactatatatacttgatattacaatgtgagcattagagttgatgttttcacttcccagtacataaaactttttcgattatagaggtgtaaactcttgttttacagttttcatttaagagaataagctgtggaattttgaggaacaggttggctatttttatgattcaattatctttgttcgctttgcacttgctgtggcttccatgatttatgccaacagtcttggttttgtcttcagcagaaacaccaggggaagttctcatgacatctctcaccatcagtatggctaacatctgttaaaacagagttgatatgaaattggatagtttttctttttaatacttgatctgggtatggctctgatctcaaattgttaaaacaataaaactacattttatatgatttatgttttttctgattataagaataatacatgcttgttgtataatgtgtggaaagtgctgatcattagtgggaaattgttgaattcatatctaagtaatatgatagctttcctttaatgagcacctactatgttaaggctctttccatgaaatgatttcactgaattagtgtcaagcagctagtaaatgattgcactgagatttaaacccaggtctgcctcattcctacatatgtggtctttgtactgtagtctatagtacatccgtagatgtatgctcctacatctgtagtcttcatctgtagtctatacaatattggcttcctggttataaattataacaagtgaataatcacaaacacacatcctttttctttatgttgctgtgttgctttggatatagcatctaacctctgaggtcttctatttccttaggggtcaattgagtataataattacacctacttcactgtacagagttaatgaatcatttttcacagagtggttagaacagggcctgatgcatgtatcttttaattgtttcctaatgtttttattattacaaataatcataattcctttcatttaaaaaatcattttatcatttctcattcatgaattcgtgacatacttacaaacacatttaccagaaagcctgaatacattaaaaattcttaagtagactagaaggaaaaatgtttaagtgaaaagatatgagaaaaacagcctaaaagcatgtaaaagagaaaaacaaattcaaataagaagaaacagctaaataatttctataaagacaaaaattccaaataaaatttgatcaaaagtattttgtgggctgtcagatacttcttaatggttaggaatccaaactaaatttgtaacaagtttaattgccattattgacttcgatctagcatgactgcatagaaatattcatttctaacaaacttgtcttaatttgcttcttagaactggccagttagaatggcaatcattaaaaagtcaggaaacaacaggtgctggagaggatgtggagaataggaacacttttacactgttggtgggactgtaaactagttcaaccattgtggaagtcagtgcggcgattcctcagggatctagaactagaaataccatttgacccagccatcccattactgggtatatacccaaaggactataaatcatgctgctataaagacacacgtgcacgtttgtttattgtggcactattcacaatagcaaagacttggaaccaacccaaatgtccaacaatgatagattggattaagaaaatgtggcacatatacaccatggaataccatgcagccataaaaaatgatgagttcatgtcctttgtagggacatggatgaaattggaaatcatcattctcagtaaactatcgcaaggacaaaaaatcaaacaccacatgttctcactcatagatgggaattaacaatgagaacacactgacacagggaaggggaacatcacactctggggactgttgtggggtggggggaagggggagggatagcattaggagatatacctaatgctaaatgacgagttaatgggcacagcacaccagcatggcacatgtatgcatatgtaactaagctgcacattgtgcacatgtaccctaaaacttaaagtacaataataataaaaaaattaaaaaaaagaaataaaatcaaagaagcacagaaaaaaaagaactggcattttgccttatctaaaaggtagaacttgaaattttattaagctgagacctccagtcatgctaaactctaccataagatacacgatagattgaaacttacggacaattcatggttgatatatagtcactggcaaaagggtggcagctgacaaaaactgctagcacagcaagccttagtcccttacaccctggcagttggaccagaagatttagtgtttcagtgaatgccagcttaaaattcatttttgtaatagattcttgagtctgggttcattgaagcgtgaactcccaaggttttatcctggcaacaaaagatacgtggaaaatgaaatagtcataaatatgactgaaacatttattaaattgccagtaggaaagtaaggaccctagcttagtatatgtgttctttatgacttcaataaaatatcatttttataactcctatgactttttatgtgttggctaaatttaagtctacattctgtttacatgaactgtgtatctgagtttatctgaaattggtttttgtgataaatcaagaaatctcctttaatgatctctaaatttagggacataaggggttatgatgtaatgtgaaatatatagtttatatgtcatatggatgctcaaatttggaaattttacatttgttataagaagttattgtgctggataattttttcttatcattgggttttctttgcataggcatgtttgtgtattaaaatttataaagtacttaatgtattattttaaattaaataaagtgaaacattcattgattcttcaaatttactaagaagctctcatctgctagtcactgtgctaggtaatagagaaaccaccataaccacatttaaaatcctttctatatgtacttacggtctttttgggaaaatttaaaacaaatatattttaaaaatgtgtattgtgataagtgcccaaagaaaacagagaggtttttgagatactgatttaaaggtatttccagtgattgtgtaagaaatttcactctaaagagagaccctttaatctgagaccttgtattagtcagtatggcctaggttatgctatcataacaaccaaccgtaaaaatctctgtggcttgttttacttaataaacaaaggttaatttcagttcatcttacataactaagtgtccagtgtaagttggcaggggaactttggtcatcatagttactaagggacttggaatgaaggaggctctatctcaacacatgcctccatggctaccaaagcaaagagccggatggtgacttgcacattggtccttaaacactttggcctggaagtgacacttctgtgttttcatatcattggccataaaaagtcacatgttgtggccatacctaattttaaagggggcagatacgtacatttttctatgtgcctgaaaagagaggaaaattggatattgggaacagcactaatgacttgtacaggcctgaggaatgagaagaaactagccattctaagagttgcatgagttcatgtcctttgtagggacatggatgaagttggaaaccatcattctgagcaaactatcacaaggacagaaaaccaaacactgcagttctctctcataggtgggaattaaacaatgagaacacttggacacaggaaggggaacatcacacacctgtcatgaggtggggggatgggggagggatggcattagtagaaatacctaatgtaaacggcgagttaatgggtgcagcaaaccaacatggcacatgtatacatatgtaacaaacctgcacactgtgcacatgtaccctagaactgaaagtataatttaaaaaaaaagagttgcaggaatagagttcttgtaagaagtctactcggtaaggggccctgcataggaaaaggttctgaggtaggaaagaagtgagtgtgttttgaagacatacaagaacaacagtggaactagagtgttgtgaacaataattttgtatacagctaaatattgattaggtgagacattattttgaatatttttctgtcttccatttaaatattaatatggtaatggtgactaatatgctggaaatattttgattagttgtcaatggggttatctttatagattgtggaagtttgtcatattgtgttccatttatgatatgggggtacagtggcatgggatgtcattatatacttattctttaaagggctctcatttaatgttaaggcgtctgcatttataagaagaactgtgttttgtttcttctaagatttgacgggtttatgatagtactaagaagaaaaagaggtctaaggagtaaaaattgcagggtaaaaaactatagggcagataacaacattctgaacatacttttatatatgggcattaatgagatatgtctgatttttttgcagttaaactctgagaaatgcctccaaataaatcctgtacttaaatgataagtttgatttagtcctggaaaataggacagaattccctgtgatcactcagttgtttagaagcactgtgttcttaattaagaaagggatcttttaaagtgtaatattttggatagctttaaaagtctggaatataataaaggccacttcaagaagtcctttatgtgcctaccactcaaattgaataaaaactttgaaaactattgcttcagatcacttcttgcccttcctcccttcctcttttaaaaagagtaaagctttagagataaaacagaaatccctatattcttttcaattcctccttttccagagtgtaaccgccctcatgaactcataatgtatttagtacatgcttatacatttactgtatccggtatttccataaatattatatatcattgttttatatttttaaggaacataaatgctatcagtctccatgtattatgcaacttgctgttttcattcaacattgagtttgagatcttcccttgttcaaacatattaggactaatttattcatttttaactactgtcaaaattctattgcataattgattctattgcataaatgtacagcaatttgcatattcattctttcactaatagacatttagattatttttcatttttcacaataaaaaaatactactatgaatatctttttaaatgtttccttctgcaggccaggcatggtggctcatgcctgtaatctcagcactttagtaggccaaaataggaggattgcttgagcccaggagttggagaccaacctgggcaacatggcaagaccctgtctctacaaaaaataaaaaattagctgtgcatggtgtcttgcacctgtagtcccagctacttgggaggctgaggtaggaggatcacttgagcccaggaagttgaggctgcagtgatccctgttcgttgcattgcactcaggcctaggcaacagagccaaaccctgtctcaaaaaaaaaaaagtttccttgtgcatttatgcaagagtttcttttaactaaacatctagaattgaatgtgccaggttatatgcgtatgtatcttcaacttactaggtattgtctgattgctctcccagtcacatgcccgtgggtgtgatcgtattgtcactgaaactcagtgttgttgggttgagtagttgggctacggagtgcacaagagcctggactctgagtctcagccctgttgccaccgaatagtgcattgaccttgggctttaccatacctttcatacctctctctgtgtctcactttcctccactgtgaacagagggtaaaaatagtcatgtcttataaggttttcttgagaactacatgacataaaatatataaagagcctagactagtgcttgccacattttttggcctgtcaggtaggtatccaatgaaacctcattgttgttttaattttgtttctctgaagatgagtttgcacatcttttcacatacttaccaaccatttgtattctcttctgtgtctgtaaatatatttttctgtttttctaaaggtgtttgtctttcttgttgatttgcatgcttccttgtgtatgattggcattaattatttatggcaaatatatatatttctttctatgattcagctatctgctcttagactgttgctggcctttgcagttttagttaaggtgattttcttatacaaaacattttagctttaactaattccctttttactaatctcttctattatgacttttgctcagaagcaaatatttaatttctaagtacgtgaaaataatatccttcatctaatgcataagtaataacttagaaggacttggttatcaatattactgagagagatatgaatgagaataaatgtactcaagtatggataatttgtgaaaaatagctataattctatgaaaatctgttagaaaatggaagggaattctgcattaaataattggtttttctctcatttctgtctcttgcccattccatatgtaattcgctttctggaagtatattaggcagcccaatccatcatagacttccatcacatatgtggtggaaaatgttacaacacagcactgaagtcagacaccagagtgggattgatatgcggttaagtagtctctactggcaaccagatttgtctactctataaagaggattatgcttttgaagagaattgctatatactttaacattttttccagctattatcgcttaaaatgttttaagaaccattgatttatatgaaatatgaaaattccttgacatgccaccccccacccctgattgccaaccagacaactcattttcaatacttgaaatacttttatgggttcaaagtcattacattttacgtgtcctgaatatttcattaaggctttaacatagaattagtgaaaattcagaacttgaaaatgggcagactttaagctttcctgagtctgctgccccaaatctaacagtttgctttgggactgtcagcctcttgcaagatttaaaaaaaaaaaactcagccaacctcaggtagttttccaaaaggctgtctgtgattttcagctggtatggtttctctccgtaacttgttggatgtcacttctcataaagtgctttttattcatatcaaccctaaatcagtgtggcccatctaattccttgttcatatattttattgagctgttatttatttttataatttcaacttttattttagattcagggggtacatgtgcaggtttgttaccagggtatattgcaagatgctgaggtttgggatatgattgatcctgtcatccaggtactgagcgtggtacccaatagttagtttttcaacccttcttcccttcctccctcatctattagtccctggtgtctattgttcccatctttatatccatgtgtagccaatgtttagctcccacttgtaaatgagaacatgtggtatttggctttctgtttcttcattaattcacttaggataatggcctccagcttcctttttatggctgtgtagtatttcatgatgtatatgtaccatattttctttatccaattcagcattgatggccacctaggttgattccatgtctgttattgtgagtagcactgtcatgaccttgttcgtatattttaaaaaccttgtggctggtctcacatcttggtaagttagtatgaatgagaccagaacaatttttcacattataatgatgataaaaaaatctttactagaataagtagttatacctttgtaagggttaagcctcatttaaacatattaacttaatatttgcaggtgacatggaaaagattaaaaaatgggactctagtggagaatattaatatagcaattctaaattgatattaatatatcaattttaaaactctaatctaaatgcagacacacatgcaaaaaatgatagctccccataaactccacctcctacccacaagtgaacaaactgaaagaattaaattcgtattgcgaataatgtgtcacctgtatcagttaagggtcttggttgcaaaaaagacaaaacccaaatctgcctcattgaactaaaaataataaaagaatgcattgggtagatcattgaatcttcaggcagtctggagaaacaagcttagagaataggtgagagtgaggggaagttgccagcagtaaacaacagctagctagtccctgcttggccctttactgccttcatcgtcctcttgctgggcgggggaaatttccaaatgtgtgtctttgcatcagtttctcccaccaagactcagacaaagtaaacatcctcccaataggaagaaggcttgaatgcagaacagaaccggtaatatccacattttctctccatagctcatcatatattttgactatggtttttatgagctctatatatccatttttgttgagagttcagctttagaaaaggaagcaatattgaaaacaatgttagaacaatcctatggatctcagctatttagacttcccagaaattgaagtagagcctttctagtaagtaacagtttagtttgcccccaaaatgtataattacatatggaacccacagtataagatttgctattttctgtctctatatgaaggcgtgcattctgtaattacctaagaatgggaagaatctgcttaccgagcagaaacacgataggtacaactattctatatcaaaaatgataaatgtgaaatgtgtgagatttatagaaactcaagtaaagtgttttttttccactaaaaattttctagtatttttttgtaaataattagggacagaagatataaatagataatacaaataataagaatcatatttctctaatttttggaggctgtttaaacagagacacatactcaacctagcaaacatctggttggaaatttaaaattttagttgagcatcagaatgtttttctgtatctggaatgttagcggagtttggaaacatgtggacactcaactggggtttctttggatgtttatcattaggcattcagagcctctcccataagttcacatactgacaaacttgtactctgtgccataatcccttcctacctgggcctcctctcagtggcatgacgcatagtctcctggcaaaaagttagaggctgcaggtagataatctgaaaaacagataatatcacggctgatcagaaattgatgacagcacttttgttgccaggtcggaacagtactgctggaataaaggctaacagtcatgaatcaaaaggggtcttttacagaccacagaactggataaatgctatgcttttgtatttgtccattgtacttcctggtgaggtaaaaagggatttttttttttccctgagtaaaaattatgtgggtctggtatttctctttgctgaataatttatttctggctgcacagtattaattttcaggctgtgaaacctggctttgattccaaacagatctttgggaaatagggagcttgaataatagagaaaataactccgtgaggaagtatattacttcttggaaggatcctgctatccatttaagtggtttcttgcagctttcatatccaagaaagttttatccatatgtaattaggaggatcaaagccacagtgaggtttatgtagacttttctgcctctctcatctttagtcttgcgatatcactgtcatgacataatgaaataacgcataggaaagtgttttggaaaaccagagagttcttcaaaatgttagtttattaatggccacaataatcacagctaaccggtgctgaggatttatttctttatttatttatttgagaaggagtctcgctctgtcgcccaggctggcgacaatcttggctcactgcaatggcgcaatcttggctcactgcaacctctgcctcccgggttcaagccattctcccacctcagcctcccgagtagctggaattacacacacccgccctcatgcccagctaatttttgtatttttgtaaaagccagtcattgtgctcattacttgagagttttatctcatgatattcacacatctacatcatacactataagtaaagctcccctgttatatccatactacaaatgaggaaactgacttagcctattcaagaccataggcgtgtagctggtgaagctagaattctggctgtgaatccagagctgtctgactgcagccctgtgcttttagtcagtatgctaagtgcatatgtctataatggcagagacacaaaatatgacaccttacctgttgagattcctagatagaagataaactgcttgaaagttttaataccatgtggagtaaacatagatgcttcacctcattattatatatataaaatatataatatatatattctctctgtgaatactatgtataatatatatgtatatagagaggatatatatattatatatatggagagaatatatatattatatatagagaatatatatattatatatacatagaatatgtgtgtgtgtgtgtgtatatacatatatatatatatatatatatatatatatatatatatatatatatagagagagagagagagagagagagagagagagagagagagagagacacagagacacacggtcttgttctgttgcccacgctagaatgcagtggcatgaacatatctcactgcagccttgaacttctcgcctcaagcaatcctctcacttcagcttcctaagtaattggcatgacaggcacattctaccatgcccagttaattttttaatattttgtacagatggagtcttgccgtgttgcccaggttgactttgaactccttgcctgaggctatcctcctgttgcagcatcccaaagcactgggatttcagacatgagccaccaggtctagaccattagtagcttttaagaagaaatttatgtgaatctttatcatgtcttttcacctggttcagccatttattagatttgtagtcttaggcaagttaccttatctcactgtgcttgagtttcctcatctctaaagtgggcataaggatagtacttatttcatagtgtcatgatgattaaaaaagtaaaaatatgtaatgtatttagagtagtgatataatattactatatacgtacatatatgtgtgtatatacatatgtatatgcatacacacgtgtcactatttcctctaccctgcattgctgataaaggcctacacaggaatataagaccacgtgctttttatcaccacttataagacgtgagattttaggttctatgtgacctttggtataaagaagaacaatgcaaaaaaacaaaggaactttgggactgtaattgcgtacaaatagtttcaatactattatccatttaagcaatagtttggcaactgctaagaaagtttgagtgttacggtcatgtcacaagattctaaagttctccaaggtacttatggtagtagtgatgtcatctggaggaaagccagttacacaaaatatattgttttattaaatctatttcaggcagccatgtttgaggataatgacaagggatcccatatactgataaagttagataagtgtttgccaaagtgtgttgcatcccacacttgtcttcaggaatgctatcgaataaaactattttatgagcaaataaattttgaaggctgcctactatagcctcctcttggcagttaagaatgcacaagagtacattaagggcccctgaaagtcatgtagtttcacccaattctgtcttttttcaacttgtaatatatttgaccacagaatcctgttttggcatagttctcctagtgttctgtagaactgatagtccattgaccacattttgggaaatactgagttagaccatatttctggatctaaactcagcaggtgcattttgtcctgaaaagaccttgacatatcagattcatcagttgtaggcatttaattaccattttatgttgtgtgctacaggagaattagtcaagagccctaagcagttatgtcaactcgttttgacttggggccagttgctgaaactttctggattttatttcctcatctgttaatcacataatcagatcaaacagtttctaagatggttcatgtttaaaggttaccaaaagaaaaaaataacaatacatttctgaaaatgcttttatacatgcctcatctagggtgagctggatgacttttaaaaagctgacagcaaagcccaatgcctacccagcactgcagattatattggaacttttttgaacaattagagtttaccttccataggtagtgtgtgtctggcttcttagacacttggccagtattgtctgaagtccaacagcaccactgcaacctccctcagcgttgcaaaaatacttactcatagttcatccactcagagaagagaagctaaatgccgataagatttgaagtggcttgggctgtaatgccgtggagtacctactgaaagagaatttccatagctgagaagtacttgcacacaagaagtgaaaagtctgaatcgaggaaaacattcagcaatctcagatgtcgtggttctatttagaggttatatcaaagtggccagtgaagcattgaataaaccaggctaatttatcaactgaataaaacggttacagtcttaaaacaagggaagggataaattagtacagaaaaaggcatttcattcagtgcaagcactattgatcaaacatggataaactccccccagccccctcgcaccatgatgatcagtgccactgagagatggcagagtgagatggttaagagcatggattttggtgtcagatacacttgtacttcagactcggggtctgttgtgcatcatcagtgtgactttgaacaattttatttaacctgtctaagcctactgtcatcatttgtggaggaaagctattcatgctgaccaaatacggttattgtacagattaagtaaaatgatggctataaagtactacgcaaacttcatggttgtgtagttgtgttttatatatatataacataataataataaaagaagtcattatagcagattcttgtctctaaaacttttatctttaagtgttttatggtgctagccaactcgtaattccaggatgcctttgaattttattgcagtttatatcagaatctacccagtttcaaacataactccttaaagaatcattacctctacaccaaatgctgtgatattccccatttctctgtggtactgggagacaactactccaatatgcattgaaagaactttctgggatgatggaaatgctctttgtgccgtccaggacagtagccactaagcacatgtggcccttgagcacttgacatgtggctagtgtgactgggaaactgaatgtttactttatggaatttaaattttaagtttaaatttagaaaaccacatgtggctagtggctactgttttggatcacacagctatacatgatttaaaaaaacccacattggtgtaagattttaaaactgctaaaattgtcaatttcatgccacagattctgcagttaaaaagctgttattgatgctttttgaaaagagaccacagggtgttcttttctggtggtaagtcatcaatcacattagttaaaagctttctatgcatagactgtggaaagtttcccactttcacactgtggaagacaaaatcttctgtagaaacctcacggagctattgaatctcattgtaataatggtgtgctgtgactaaggacttgatcccctgcgaagctgaaggttccatgaaaacagaagtagaatatacattctctgtttatatggtacaaagctgtaaacctgtctattaagacacgctttttgattatgttcttatttattttttttttgtctacttgctctgtcaaatttgacttgtatttctaaaagtttttgctctttttatttcactatattttttagttagataaatcttatatcctcttaatggattttagttttaatccttataatactctttttttgactcagtttaatacttttggaattaccttttggaattccattctgatattgattattactacttctactttcttttgtattttctttggtttttctttgccgttctgtttattttctactcattttattttgatggttttaatatagacaggatagggctgagttttgttattttagtcagatctattgatgacttcattgtttgattaaaatctaagcttattcatatttattgtgatttcagtatattttattcccatcattttaagtatataaagcattatattttgtggttttccttttgtcatttttattatcattttggtttaatcaattatacttcagttatctattttcaccacctttctttaattaagaaattctgtgtccttcattgaactaatggtcacctttttatctttcaccattattttgaaacacctgtacctctgtcacaacttttgcgtaatgtctaaattgtacaaaatgtcaccccaagacattttacttattcactcatcctggtcccaaattgagattgtaggaataatttactagcgagtcttcatatggcagatacttttgctatctctcagttcctgttgttatcatttcaggctattattaagttttatcttatcacatggctcttttgtttcaagaatcctttctcagaagtgtagcctgtgaatgctatttcactgtactttaactctcaggaaacacaggagaaaacgaatgctagcctatttaatctcctttgtaggtagactgttctttctggaaatggaaggatttttctctttttcttttattttcagagttcagaaattcagagatctcatgaagctttttcgttgagtatatcttttttattatcattatttctgtctaggatgccatgagccattctaacctgaaagtgtgaagttatttttcatttaaacttaggatattttttccaattacatctttattacttctgtacttgttttttaaatcttagtttggaattcatattacttacattccagtttctaggctctatgttgtgacctgtttattctcactgacttccagacaactaatttagcttgaagcagtgaccatccctttttttgcacttctgttgagtctaaatattgaaaggattcactctcctgaactaaagagagactttagtcttttaatttttgtctgtgacatgaattttctcactaccaatactagtaagttatatgggtttccctgacaataacacattttcaggctgtataaaataaggtcatttttattttgcaaagcaggtaacacagtactaggacccttctgttgagatgagaccgggggatgtctttgctcttgcgcctctcctggtgctaatgtataaaagacaggcatggtataaggttctaattccaggagccaggaatggttcacctccttacagaccactaccaccaccaccactgggccatcagtgccagcagggtcacttgattatcactgttcttcatgcagcaaataactgggaaagagcttcccctgtgcatttcaaatggatttattgatagatgctacctgtgtcctcttagaatgtcctacggtctaatggttttctaacttttcagcatttccctagaattctcaagtaacgacaaccccagtaatgaatcacatggcatttgctggcttggagaatctcagcacagttgcttagatgttgtattggaagttacatgccaggacagaatcatagagagaggtttttgttttcccattacacattagtttcctcggaaaggtgttatttactaagtttgattgactcagtagcatgtatttggctgcttacatcactcaggaggcattgatttgggcagaaatttcagtaggaaaatactacatggaatccatgggctctgtcagcaaagtgtgtgtaacattttcatggcagccaccataatccagtcttgtgaccatattatttttggaccaaagatgcattagatctgttcaagcaccttgtttctattggttctatttctgactttattgataatggataaatgttttctgagtacgtgtcacttttccctgaaatatattcaggcctacttaacgatagtacagattttcctaagatactataaaatgtggtacttttaaatttgacttgcttatgatccatcttttgtgttaatcatttatatctctggcccccttattaactcatgtcaaaatattttcatctctttaactttcttcttcaaaagtgacgatatccttctgcttaactaatcttactagtttttaatcttcagcaatttttgttgtccttaaagtaagttaattggttttgctcttgggagagtgcacttttagggttataggctgtgaatttgaggaccacatctttgatggccttcacccgtatgaaacgtgacatcaaagatagcaattttgtttgcatcactggccagcacctaattatcgttacggcctcttcattcttaaaatgccctttgatgtcagcagtagccttgtgctttgaaagactgcagagaaaggtgaaagcagtcctttggccaagcccacattccactgaaatattacatgatggtattaggttgaaataaaatgcaaggcaactgtggtaattaaagtaattactcatttatttgcagaaacgaaagtctttaatgtttctctcaatgcacagagataatttctccctggtgtaacacggctagatggagactcatctttgggagaaaccagaagaaaagcaaacctgggcatggtaattgggagttaggaaattatacataggaggcaggaggaggcatctgtggggttgtgacagtactcattagcacggtgaaggcaaagttaccaaaagctgagaatgtagaaaacccatgtgttggggtgaaggaacatagtgtaggggtaaaagcacacaagcacttggagtgaaatggatctcaaaggtgaatctcactttcacttgtctttagctctgtgattcaccatgtattacttaatctgtgacttttaatttatttgtaaaaatggcaaaaatatttttagtacttaagataaaaagatatattaaaagggccactacaaagtaatatgtaccacattgttaatttttctagttttcaagaatggggacaatgagttgctgtcaaaattcaacaagaagatattgtttttacccattaaatgaataaaaaataaactctttgcctctactctgcattggagagagtgtgagggtacagacttccttgggcactactgatgacagtgtaaattggtgccacctatttagagagcagttctgcagtatttttcaagctggacacttgacccagcagttccagtgccaggaattagattacagaaaaacttgccaaagtatagtcagtaagtatgttgaagagtgcctatgtagcactgtgtgcacttgaaatcagttgaaaacaatataaatatccatcacgaggggcgtggtcaatgtcgcacgtgaatatttccatgccctccatggtgactctgcatccaaaaaatactcagtttatttttgtgttaaatattcaggcttgctttatttaaatatgatttcaaaagtctacttactcccggagctttttaaatatttatttttaagattgtcgtaaaacacacattgcataaaatttgctgtgttaatcattttttttttttttctgagacggagttttgctcttgttgcccaggctggagtgcaatggcgcgatctcagctcactgcaacctccccctcccgggttctagcgattctcctgcctcagcctcccgagtagctgggattatgggcatgtgccaccatgcctagctaatttcgtatttttagtagagatggggtttctccatgttggtcaggctggtctcaaactcccaacctcaggtgatctgcctgcctcgacctcccaaagtgctgagattacaagtgtgagccactgtgcccagcctgtcgtaatcatttttaagttcaggggcttgaagtacattcacattcttgtgcacccattgccctcatccatccacagaagtctttttatcttgtaaaacagaaatctccttacccctcaaacaaacagtaagccttcattttcctcccaccccaaacccctgccaaccaccattctactttctgtctttatgaatttgactactctggataccttgtgtaagtgaaatcatgcagtatttccccttttgtgactggcttatttcactcagcacaatatgcacaaagttcatccatgttgcaacatgtgtcagaattttcttcctttctaaggctgaataatagtttttggtatgtatataccgtattttgttatctattcatctgtcagtggacgcttaagttgattccatcttttgttattgcaaatagtgctgctgtgaacatgggtagataaatatctcttcaagtgcctatagtcttaacagattttagtagtcgctttaagagattttaaataatatttgtttctattttcatacctagtttatgaaataactccatgccttttgaactgttttgtttattaaatacatcagatatctttttaaagtgctttcttaggtacttcagtcgtgcaccttaaaaagtactcaactcctaaaagctaataaattaaaaactacatgtataaatactcaaacttataattttataagacctgaagcttaaatgatccaattctatatataagcctaatgacaatcatcataactctaaataagttactcaataatttatttaaaattgtggttaaaaggcagtctctcatgcattaaaaagagttttttttgtttttgtttttgtttttaaggccagtttcatggaataggccaaatgttttcaggcattacaggtacataatatttgcacagatctcttaaaataaaaatattaatttaatggctttgattctcttaaacatttttgtacttaattctaaaatttctgagattgaaagatgcttaacctcaaggaaggcaattatatcagttatttgagtttatttgatctaaagatttagacccagcatgaagtctggagctgcagacatccaaggcaaatcttactgaaatgaaggaaatgtttttattatcccatataattttgggtactgccttctttgcttgctgtgtttatatctgtgattagagattttagattctcaattataacctcatcattgaaatacatggaacctcatttataataaggacagaattgttggtcaaaaactccattactcgaaggaattagtcacctagccaggatccttagattaagttacacatattgcagaattctttattttacatgtttatgtctgtaactcccatacaagatgatcactttattagttactgagaacataaataccttcttgcctaagttgaaagaccatgcaagttgataggaaatcctacatttttaaatgtactttccaagatcaggtaattcttttctgtaccaaagtgataatgataccttatggcgttatctgacttgcagttacagcatagaaggtctctaacattgtcattccattgcacaactccagggaatgacatttacattaaagtatgtgggaagcttctaagttatgcagggcacaatctatgcagttgtacactgtaactgcattccactgacagtcacataaatgatattatagccacatgggcagctgatgtattgttgtccctctggctgtttcccttctcaagtagggcctcatggggacatctagtccattgatctcactgctttctttcatttcttaatctagcagtccttttcttacttcccgtcttgtccagcatagattccatggtctgtaatttcaaaatatgctaacattctaccctgagcttccttgccattctgtttttttcccccacatctgacagacaaaagcaaaaccctggatgaaccctaatctctgaatgagctcagctgcctagagttgctggaaaaagtcacaataaaaaccttctttcttaaccccaaaccccctaccagactcttttgtctttaccttgaggaaacttctccaaaggttgtctggttgtactcattgtcttattttctcatctccagccagttccttaactctctccaacgtggctgcaacttccatcacttcaccagaagatctcttgctaagatcaccaatcacctgcagatgcatggaaccagcctcctgcaatttggctgctcagcagcattcagtactgttgagcctcctttctacagcatgtgcttcctatgtcctgtgggagtacaatctcctgttgctctcccatctctctggctatccatttcctgtttcctcagcagactcattcccttccagcccactatcaagtgctgaaattcctcaggactgtatcctagactcgtttctcttttaactatattctctcactccaaggaattttatccacacccattgctttgaaaactacccaactcacatgactcattagtgtgcatcttcaatccatatattctaaattctgtaacacactggacgtctcctgttgggtatctaaaggcacctcagtgtaacatgttgaaaaatgaacctaaaatcctgattgtcttctattaccagtatatcaggaaatgacaccatcagccatcctcataagtgaactaaaatcctgatcctacttttggtatctcttgcttactcatcttccacattaacacattcacccgttcattttttgaattcaggaacttttattccaagctctgttcacctgtacaatttctggttccactgtatcttgtgtcttgatcatgagatttctaaaagatttcctagcatctactcttaacactttagaatacaaatataagcttgtcattccatgccagaaagaagtctctccactgacttttttttttttttttttgagacggagtcttgctgtcttgcccaggctggagcgcagtggtgcgatcttggctcactgcaagctccgcctcctgggttcacaccattctcctgcctcagcctcccaagtagctgggacaacaggcacccaccaccacacccagctaatttttttgtatttttaatagagacagggtttcacctgttagccaggatggtcttgatctcctctccagcctcatccttcaccaatctcctctcttacatgagccacacactaccctaggtgcaccttgcttccaccccttcatagggcctttggactttatgccccgttggccttttctgtttcccccaacaaactgtaaattaactctaaaaggtcaaagacattggtgctctcttctctcactttcttctgtatgtctccttcctcctctctttcttattcacttttttcccctcactgttacatctccagagcccagaacaatatctagtatatactagtcactcagtaaactcagttgtagacttaatttccaagttatacaattaagagaacactccaggttcagaacactgtatataaataattcaaaaaggtaagtgtaagagatgattaattgtgtttttatttagaaaaaagtatcacaaatctcaacatgttatgaaaagggcattttattttttccgtatggtttggattttagcaagtgtattatattttattttaagaatgtttaattttctcaacttgtattttctataaacaataatgctcaactttggttttctagcatgatttatcatctctaattgtgtaaaaaggacttgtgaaattacagcaaaattcccaagcaaatgtgtttatttaatgtaaaatgtgaacccaggttataataaaaattgtagaaaacagcaaatattaacaaagatgtggaagaactagaaccctcatacattgctgaggagaatataaaatggtgaacctattctggaaaataatttggcagtttcgtagaaagttaaatgtatatttgtcaaataacagtttcttagaaagttaaatgtatatttgtcaaataagtagttccactcttaaataactaccaagagaaatgaaaacatatatccacacaaagactttcatgcagatgttcattgcagcattatttataatatcccaaaagtaaaaacaacccagatggccacagactggttaacagatgtagtacagccatacaatggaaatttattcagcaattagaagaaatgaagtattgatccatgctactgtatggtcttgatgaacattatgctaggtgaaagaagcaagacaaaaaaagaccacgtgttatatgatttcacttatattaattgtccagagaaatcaaatttatagtcacagaaactagattagtggttgactgaggctgggacagggaatggacacaagttctttttgggtgatgaaaatgttctaaaactggattgtggtgatggttgcataattcaataaatttactaaaaaccattgaattttacacttaaaacaggcgaattatggtacgtaaattacaccttcctatagttatttgaaacaacaaaacaattagcagccaaagtttttgatgagcttgctaactgcactaattttttaatgtgaataaaaatggaaattgcataagcaaattaacacgccatgttgcacttagatattagaaaatcaaactagcaatatttgtgtttcacagcctaatttttaacaaaattttcttggtcatgtcataacgtgtaacataactgtttataggtcattagttccaacatactaagtgataagcaattttccccttttacacttagttaacacactgcaagtatccttgtgactatgaatggttagcatggtatacatcagtatttttcccacagtgcaacttttaggaagagaatgcatggccaatcacaattaattaaggtattttaaggactcttttgtccataattaaactgcaggtagagtctgggacaggatgttttaaccctatcaggaaatttaaattcttttacaatatctagtatttgttcttattttacatggtagtaattcttgaattagtagataagattgtaagtttaaattttaaagtatttagttaccaaccagaaagcaaattgtcatcatatacaaacataggttcagcatattttgtaaggagtaaaatgtaagcaaaacaaataagaaatggtcaactctattcctgccaagtggaaggttgccttaattagtgacttcaacaagaaaggtcatttgcagaggacaaacagctgtccttgtccagatattccccttctccacagagacggtactaagaggacataagtttaaggtgtagttagaagaaggaatgaatctactgtcaagttggtttatttatgaatttggttatgagggagactgtgcagatttcattctgggaatcctaaaagtgcatagaatgtgaacatgggtattcacacattgacctaaaaacaatatgtgtttttatattttttttgcaaaaaaacagacttttccccacgtattcagaacttgatataacttataattaggaatttaatgtttatttaaaatgacaaaatatttatatctgaaggacaataggatagattttaaaagtttgcaacctgacaatttgcagtataggaagtgtgtttgtttataaggttgccatatcttcacgtatactccaaagatctttttcaaaaacgagacttgcagccagcacatctgttgttcttatgcaagggattaaaatgagctatttttgttgaagttcagctgcagagtaacaatgttaaaatggcttgccaagaaattacctattctcgattttgtttcttaatattgaacttctaaactgttctttgcttctgtcggagacagcctcattcttctttaaagcaaatcgaagttttatgtggttttaaggtttttgttgttgtactgcagcacgtatatgatatctaaggcttcctagcttagcattttgaatgttaaattatatccaagtttgattttcctagaaacagtttttcataaaaattataccaacattattgactcttcctcctttaaatgttaggtagttttgttctcataaaactatgaattaaatctgtgtagctttccccttggagtagaataatatcatttatgttagaccttatcaagaaacctgagtggtattttgtattcccaagaattaataaactgtattgacataatccctgtgtgtaaggaaaaacacacaactttttcatgtatttctgttgtattttatagcaaatgagaataattgaattggtgaatcctcagaaaactgacctttctctgatttcttgtatctctcaaaacagcaacaacaacaaagctgaaattaaaatttatttagttcatgattcagttctgtttcaccgatcatcgaaaagtttcactgaaagtaaatcacagaagaaagcaggatagagcagaaatacccagggctaactttccaactgcctgcagtctatatcagcccttctgaaactccaaggtgcatattaatgcccggtcttgttaaaaaatgcagaacctgggttagtgggtcagggtagggcttgagtctgcatttctacccggccccaaagtgatgctgttgctgctggtccatagaaaccttgagaggcggggatctaaatggactgtacttaatattcatagaagaatttgcctatgtatcacacatgccatacatttactaaggcttttgttatcaccataacagagctggacaatgtacagtcacttgctagagaggagcgatcatataatactaacttacgtgtaaggaattcatgactatgtgccttattaatgagatcttcctaactaggctacccatagaactaaactgactgacacagaaacagaaatcagattcttagaactgaatatttacaggcagtttagattgcccaaatatatgtgtgatatggaaggagcatatctttattgatttgttttaattttctaaactcttgttcacctagtcagaaaagaaaatctctgctaagtaaagaggagtcattaatgctgatgccttcagggcccaggaaggaaacatcagtgaatgtactgagctgggatttagtggtgtcctggagaaaacacacttcatcccaccagtgctgtgtgacatggcaggtctagcatgaccagaacttccaatttttcaagagaagccagaaatacaaatttcatgtggaatttcccaagtttacaatgttggctactaatttaaattctgtaaaagcattattcaggccaagaaggcacatctgtatcccagacacagccctgagccacccatttacagtgtctagtgtggaatacattgaagtctcttaaggtacttctcatgaatggaaaattatgaatttttaacatgaaactctctagccttctgtctttggacactttggtcagaagaaatagtctctgttttatgcatttggaggcactggtataagattagtatatgatcataaaacctgtctttctttcttctcccacattccagattacaggacaggcccgtgtttcactcaggtcaacaaccagatgtgccaagggcagctgacaggcattgtctgcacgaagactctgtgctgtgccaccattggacgggcgtggggccatccctgtgagatgtgtccagcccagcctcagccctgccgacggggtttcatccccaacatccgcactggagcttgccaaggtgagtcagctgtctgcctgtgcacaccatcgcagacctgccacttctctttttgttggagttggagaatctggcactggatggtagcttttaacagaatactgatttccaagagtggcctcgttaacaaccctgaccagagaaggtttatcttttagccacctaatgaataattgtttcaactgttgacattaatggagaagagaaagagatgaagaattgggggaaatgtaaaaatacagtgtaaaatatttaatacaatcaaaggatgaaccactctatttttatctagatggcatgactcctcccttaactatactcatgcaaatacccaggaaaaacctattttttctctttatctcattcaagttatgagaatctgaacccaagtaacaaggagaagaaagccacctaatattggccctctatcattattaatagtgtcttcaaagacaaaatgtgaactctgtctatgattgcagttattacagactttgtaacctgggttggtcatgatctctgggttttgacactccctaactgcattcatgacactgatttctatattagggccagatcagggccctgaggatgctaccttagtagactgcaatccaagtagccaaaaattgttacctatttactgattaattattttaattaattttcagctgccgcaattcttacctttttctagcaacttctctgatatcaaatgtcttaaatccatttttagagctcggaaatggtctctctaatgacttcttaaatggcagttgccttcatattgcatagcagtaagatcacaggaaaacagaaatgatttttgtattattcacataaataatattattcatatttgagactttgagagttagggttattttctataattaaaacatgcacaaagttagatccaaagtctttcaaattgatgttagtaagctgtgtcacaagtgaagatgttatctattgggcctgtgtaaatcttacattgtagcaagcctggtcagtgtcctaaatctcaaatgagaattacagtttggggagcacatacgtaactttagttcattgaataataaaatgtgagtgttctgcataattttgtaaatgtgtccctgacagcagcatccacagatttttgttagtgttgtagttttataaaaggtatatttttaaaatggtctatttctaaaatcattttgaatccgaactacggagataccaaggggatgactatataactaaaacatttaccgactttatatttaatcacatatgaaagctcacatatgtgagctgtggacttagaatagttctttttagtgatgaacacagctcaggccttaatgatgaagactgagtcaaatgccatttttaatctattgtttactatggatagtaaaattctgtatgttttggtatgaatattagtctgaatatatagagttcctggtagtgcaacagtttcttctataggaagatattctatattatattgtatctgtctttactgtgctccatatggtctttactacatcttagtatacagattaccatgtaatttatatagtggatatagattattattaaaaataaaatactctactatattgatttactagtttaataatgactggatttactatagtactactttttgtttattcggtaccctttattaccttctaacatactaacttcatttctttgttgtttttaattctcttttgactagaatgtaagctctatgactgcagaaatctttttcacttattcactgatgtctcagacatctagaacagtgcctaatatacagtagaagctcagcaaataccttttgaattaataaatgacattaagattgaaatacttccaaaacccactatttcagagaaagaaacagttcaggttaagaaaagcctttaacttcaaccaaaacattccaaattattgacttttctcatgttctgtatttatacttatgcttttttactttcatactttgtcagaggcctagtttttttcccaaacacaattataaaaaatgtgtcatctgatctcaaactttctgaatgtcctttagggtttagtaatgtctgaaggattacttatttgatttggtttatgcatcaaagataagtttcaggctccatttgcctaaaaatctgagggattaacacagtaacaggaacaaaatgaaatttgccacatgattaaaatgtctggaaaagcacgttgaaaagttctgctttatttcaaaatcatggcatagtcagaaagttctcaattaaatactaatccgtagttcaggctattttaagacatcttactgtgatttcatttttttcctttaaattcctagactgtttcctgaatacttatgccaaattagtttggaagagatggggcatgaaaaaataatacattaaaacatggtgcatatatgtcattaaaaaaacagtgatcttttttatacgatgattgagaagtgttacagagttaaaaataaatttcaactatgtggatgataactgtaaatagcttaacactagctctaaatcatggttcttttgaagtttggaagataatgatatcctgtagctgatgaaattagttgtgaatgaaacatgcccttgtaataaacagagtagctgtggaaaatgagggacaacaggaaattaagataatacttaaagaattaagctgtgagaaaatcagtaactttattttatttatttattttgctttatttcttattaaaaaaacgaatacatgtgcagaatatgtaggtttgttacaggagtatatgtgtaccatggtggtttgccgcacctattgacctgtcctctaagttccctcccccgaccccccaacaggccctggtgtgtgttattcccctatctgtgtccacgtgttttcaatgttcaactctcacttatgagtgagaacatgtggtgtttggttttctgttcctgtgttagtttgcagaggatgatggcttccagcttcatacatgtcccagcaaaggacatgatctcattcccttttatggttgcatagtattccatggtgtatatgtaccacattttctttatccagtcttatcattgatggccatttgggttggttccatgtctttgctattgtaaatactgctgcaataaacatatgtgtgcatgtgtcttatagtacagtgatttataattcattgggtatacacccactaatgggattgctgggtcaaatggtatttctggttctagacccttgaggaatcgccatactgtcttccacaatggttgaactaatttatatttccaccaacagtgtaaaagcattcttatttctccacagcctcgccagcatctcgtttcctgactttttaataatcaccattctgaatggtgtgagatggtatctcattgtggttttgatttgcatttatctgatgatcagtgatgatgagctttttttatatgtttgttggccacataaatgccttcttttgagaagtgtctgttcatatcctttgcccactttttgatggggttgtttgtctttttcttataaatatgtttaagttccttataaattctggatattagacctttgttagatgggtagattgcaaaaattttctcccattctgtaggtttcctgttcactctaatgatagttacttttgctgtgcagaagctctttagtttaattcaatcacatttgtcaattttggcttttgttgcaattgcttttggcatttttgtcatgaagtctccccccatgcctatgtcctgaatggtattacttaggttttcttctagggttattttggttttggattttacatttaagtctttaatccatcttgatttttgtataaggtgtaaggaaggggtccagtttcaattttctgcatatggctagccagttttcccagcaccatttactaattaggagatcctttccccattgcttgtttttgtcaggtttgttgaagatcagatggttctagatgtgtggtgttatttctgaggtctctgttctgctccattggtctgtatgtttgttttggttccagtaccatgctgttttggttaccgtagccttgtagtatagtttgaagtcaggtagcgtgatgcatccagctttgttctttttgcttaggattgtcttggttatacagggccttctttgattccatatgaaatttaaaatgtttttttttctaattctgtgaagaatgtcaatggcagttcaatgggaatagcattgaatctataaattactttggatagtatggccattttcatgatattgattcttcctatgcatgaggactgaatgtttttccattgtttgtgtcctctcttatttccttgagcagtgttttgtagttcttctttaagaggcctttcacatccctcgtaagttgtattcctaggtattttattctctttgtagcaattgtgaatgggagttctctcacgatttgactctctgtttgtctattattgatgggagttcactcatgatttgactctctgtttgtctattattggtgcataggaatgcttatgatttttgcacaccgattttgtatcctgagactgctgaaattgcttatcagcttcaggagattttgggctgagatgatgcggttttctaaatatacaatcatgtcatctgcaaacagatacaatttgacttcatctcttcctatttaaataccctttatttctttctcttgcctgattgccctggtcagaacttccaatactatgttgaataggagtggtgagagaggggatccttgtcttgtgccggttttcaaagggaatgcttccagcttttgcccattcactatgatattgcctgtgggtttgccataaatagctcttattattttgagatatgttccatcaatacctggtttactgagaatttttaacatgaacggatgttgacttttatagaaagtattttctgcatctattgagataatcatgtggtttttgtctttggttctgtttatgtgatggattacgtttattgatttgtgtatgttgaacaattgaaccagccttgcatcctggggacgaagctgacttgatggtggtggataagttttttgatgtgcttctggattcagtttgccagtattttattgaagattttcacaatttgttgttgttgttgttttagcaagttttttgttgttgttgttgttgtgtctctgccaggttttgatatcaggatgattctggcttcataaaatgagttagggaggagtcccttcttttcaattgtttgaaatagtttccagaaggaatggaaccagctcctctttgtgtttcttgtagaattcagctgtgaatccgtctggtcctgaggtttttttggttggtaggctattaattactgcctcaatttcagagcttgttagtggtctatttaggggttcaacttgttcctggtttagtcttggtagggtgtatgtgtccaggaatttatccatttctactagatttctagtttatttatgtggggtgtttatagtattctctgatggtagtttgtatttctgtggggtcagtggtgatgtcccctttatcattttttattgtgtctatttgattcttctcttcattcttctttattagtctagctagcagtctatcagtttcattaatttttttcaaaacaccagctcttggattcatttatttttttttggagagtttttcttgtctctaactccttcaattcttctctgatcttaggtatttcttgtcttctgctagcttttggattagtttgctcttgcctctctaactcttttaattgtgatgttagggtgtcgatttgagatctttatagctttctgatgtgggcatttagtgctataaatttccttcttaacactgctttagctgtgtcccagagattctggtacgttgtctctttgatcttattagtttcaaagaacttcttgatttccgccttactttcagtatttacccaggagtcattcaggagcaggttgttcagtttccacaaaattgtctggttttgactgagtttcttaatcctgagttctaatttgattgcattgtggtctgagagactgttatgatttcagttcttttgcatttgctgaggagtgttttacttccagttatgtggtcaattttagaataagtggcactgagaagaatgtatattctgttgatttggggcagagagttctgtaggcatctagtaggtccacttgatccagagctgagttcaagtactgaatatttttgttaatttcctgtctcatttatccgtctagtactgacagtggggtgttaaagtctcccactattattgtgtggaagtctaagtctctttataggcctctaataacttgttttatgaatctgggtgcttttatgaattcaacagaagagttagctcttcttgttgaattgttccctttaccattacgtaatgcccttgtttgtcttttttgatctttgctggtttaaaatctgttttgtcagagactaggattgcaacccctgcatttttttgctttccttttgcttggtaaatattcctccatccctttattttgagcctgtgtgtgtctttgcatgtaagacgggtttccttagtacagcacacgcacaccgatgggtcttgacagcttatccagtttgccaataagtgtcttttaattggggcatttagcccatttacatttaaggttagtattgtcacatgtgaatttgatccggttatcataatgctatttggttattttgcacactagttcatgcagtttcttcatagtgttattggtctttatattttgttttttgttttttttttttgcagtgtctggtactggtttttcctttccatatttagtgcttctttcatgagctcttgaggaacaggcctggtggtaatgaaatccctcagcatttgcttttctggaaaatattttatttcccctttgcttatgaagcttagcttggctggatgtgaaattctgtgttgagaattcttttcttgaagaatgttgaatattggaccccagtcttttctggcttgtagagtttctgctgagaggtccactgttagtctgatgtgcttccctttgaaggtgacctgacctttctatctggctgcccttaacagtttttccttcatttcaaccttgaagaatctgatgattatgtgtcttggggttgatcttctcatggagtatcttaatcgtgttctctgtatttcctgaatttgcctgttggcctgtcttgctaggttggggaagttcttctggataatatccagaaatatgttttccagcttgtttccattctccctgtctcctcctggtactccagtcaatcgtaggttaggtcattttatgaagtctcatgtttcctggaagctttgttcattccttttcattcttttttctctattcttgtctgcatatcttatttcagtaaggtggtcttaagactctgatatcctttcttccacttggtcgatttggctgttgatacttgtgtatgcttcatgaagttctcatgctgtgtttttcagctcccttaggtcgtttatgttcccctctaaactggttattctagttagcaattcctctcaccatttatcaaagttcttagcttctttgcattggcttagaacatgctcccttagctcatcatagttttttgttacccattttgtgaagcctacttctgtcaattcatccatctgatccttcgtttagctctgcacccttgatggagagatgttgcagtcatttggagaagaggcactctggccttttgtgtttttaggattttttcattgattctttctcatctttgtgtgtttgtctagtttctgtctttgcagctgctgacccttggatggggtttttatgggggcctttttattgctgttgatgctgttgttgtcactttctgcttgtttgtctttcttttagtagtcaggaccttcttctgtagggctgctgcagtttgctgggggttcacttcaggccttattcatctgattcgcccccatgactagagatgtcactcaaggagactagagagccgcagagatgggtgcctgctccttctgggacctctcacctctaggggcaccaatctaatgccagtaggatctctcctctataaggagtctgacaaccgcttttggagggtctcacccagttgggtggcactgggagcaggatccgtttaatgaagcagtttgtcctttggtggagagagtgtgttttgctggggggaaacccactcggccgggctgcccagattcctcagaactaccaggaggagaggctaagtctgctgatcccgagactgcagccacccctccccctaggggctcaggcccagggagatccaaattctgtctctgagcctctggctggagttatcggagatcctgcaggaaggccccacccactgaggaaggatgggtcagggttagacctgaagaggcactctggcctcagactgccacagccagtgtgttgggctgtgaggacaagtcttgggaccaagccatccaacctccctggctccagcaggggaaaagcacagccgggagctatagaaatggatgcagcccttccccgtgcccagagagcttagtgtgttcagcagttgcttttttttttttttttttttttttttttttttttgttgctaaccctcccccaaggagctcaaaaggcttagagagcagacagcagcagctggagctggtcgccacaacccccggggggctccataggcttaagcagattcctgctcagaggctgtaataatctgtacgttccagggttgagatggtagtcccctgtggcttgggtttgagagtgggatcctccgattcgtgggttgcacagttccctggaaaaaacagtttactaggctgggtatcacactcactcatgacctcccttagctgcggggagggggtttcccatccccgtgtggctctcaagtgggccgtggcaccacactactcatccttctctctgtggatcacgccagccttctagtcaactttgatgaaagaacctggatacattggttgccagtgaaggattcacactctttgtttttttttgatgggagcctctgagagacgctgcttctagtcggccatcttggccccacattttactttaaactgttgccatgctaacattctggacttaagtagtgtcagaaaggtgtgccctcctagcgtggtatgaaatcagtcatatcaattcttgatggctttaatattgagagccatttgagttttagccgttgtgcttaatccacatttaatctactttcttccattttattatacattaaaggaccaaagttaactcatataggacttaaaatttaagctatcataaaacaagtgaattaaaaatgttaatagtgtcattaagcccttttccaataatatttgtgaactttaaatatataacaaattgccatgtgcatatgatgtataattttcttacaaagtttcttctttttttgtctttagtctcatgaacctactctaattaggagtgacattttgtttaagattagtacttggctttggatcttttaggttttcaaatgaacagggtgctcctaaaatttttttaaatatattaaaattaaactggcataattattaatttttgtaccatgtgatatttagggattaggcttttaaactacttcaaatgcttcaaaactgaaggtatagcagaagaaaattgtttgtgaaatttcatctcttgcttcatcattgatgataataacattgatgccaagcctctgctcctttccaggtaatgtgaaatgcacaggaattcacatatttgacacaggccctagctaggacacaggataaggtcatgaataaagaaatagcaatacagaccctaaattggtttctgcaaaacaaatgctggtgtgtgttcttttcatatggcgttagtgcaccagaaacataatttctttagtctgactgcatgtgagagagtagaggactttaatctcagctgaaatcaggcagatgttgctagctcctcaattgttgaatgagcagaagacgccctgagtagaaagttatttccaagccttccacatagccaagtaaaaagtaaacttggctattatctgatttatttgattagaataaattattaaagatagttacagccaaaacaaattcatcttggctgcctacattaaccaagttaacgagatcattataaagtctaactttaattcatgctgtattaacacaagttattcctaaacaattaaaaaactttaaagcaaactcaattatagaaactcctatttaaagataacagaatattcctcttcttctaaccccacaaaaaactaacatgaaaatgaataatagagaacaacacatcattctaaaacaaaatcctggaacaaaaccagtgatgagcacatgtagctgttgggaagtcactgggacagggagagttttctaagcatttactctgagtgtcataatcctgaaaggtgtttgaacctactaagagcagagagctaggattgtggatgttctattggagaggaggagatgttcccataagagacagatctacttcagaacctcacagtaacagagggtaatggaaggagaaacttggggggggggcaagccatttctgagtattctactcccagtcttccatcccagagacactccttgagtgaggtacaggagggtggaaggacaaagaggaagtatggaccactagcaagtaatctgtaaatataagagtcacaccaccaactgacagttgaaaattgatgctcaagggaaaaaaaagttgggggaggagtttggtgacaaactgtttcaggactatgccttgtggaagtttcaaaccaacacgtttcctttgagccttccccactctgcatttcagcaggaaatggctgcattgagagatgaataataaagagaaaggcctgcatataaaaactgaaaaaaaagaaaaccaacaacaaaaaaagaaaacataagtaaaaggcgggtatgaacatgcttcaaagaattactacccaaataaatgcaaagtttatatacttctctcttatctcaaggaaattaaaaacaacatttttaatggaaatttaaagcaatgatgctttgtggagcatcagttataggaaggccagagtggatgccaagaagccagttataaagtttctgcagtagtccaggtgctatatgatggaggctgagaccgggtagtagcagaggaaagatttgagatattcttggaaagtaagcagttgttgctgatgaagtgatgtgacataagtgagaggaacatgccaagtttctctcttaggcttctgactttaacagctggaacacgatggtgacatttgtgaagataagatcgagatagaaccatgctctgttcttgttattacaatttcagggtcctgcagatatcaagttaccaatatatacttgttttgatgatcattttaacatttgaattttgtgtatcatacatgagtagatattcattctggatcaaaccatattaaatgattgctaggacaccccatatgtttcagattccaaatagaaatagacctattatttagttgctgcccttaaagttagacatttgttttcataggaataaaatattatgtgtgaatatctacagagtatagaaataagaatttctgtttactaatggaaataataagcactggggactccaaaagtagggaggctgagaggagggatgaggactgaaaaattacctattgagtacctactgagttttcactatttggataatgggttaactagaagcccaaaccttaccattatgcaatatattcacataacaaacccgcacctgtatccccgaaaccataaaaattgaaaagaaaaagcaagttcaatgtaaaaaaattaaaattagaaatggatctaatttggtaacaagaaaagttaaaaaacacgctatgaaatatagtagtaatttctatgtcccctggttgctacacatataaattaaatgaaccatttttatatgcctataatactgcacatattttccatatttggacatgaactaaaaataatatatcatctaataataatttatgtaataaaataagtttaattttttagaacaagtttacacggagaatttggagaataaatgaggttataaactagaattattgttgctttgttacattatttttaaccttaatagacatggactgacgttattgcataaggtataaatttcaaaatatataattgtgttctataaaattgttacatgtgatttggaataattcaaaatttaaagaaatagtaagtttttgcctgaatcgaaggaatgagcaaagataacatctgtacagtctggtcattggagaattaatcaatcattagtagttgcttgtgataggactttgcagatgtagaaattcttgcatagtttgaaggcttgaggcatgcttttttatatttataaagagcacatcttggtccaaagtggttattttttggttatttctatataatttcttttaaattttcttttttattttaactgctaacttgatctaactaaaagaaattaattctacataactgcagagcctaggagacttcaaaaataagggtttcgttcttctaaaaaaatactttttaggcagttacagaataaatcctatgatgctggattgtttttctttttgaaaaatcactgaatctactataatccgtatgcagcatacaattttatgaataatgttaaggttttatagacttggtctcatttttcagcttttaccatattttttctctgatttatctgccaggaaaacaagtttctagagctcttttataccacactgtaatgagagtgggagtgtagtacatttaaaaatgaggtttaaggctgtgcgcagtggctcatgcctgtaatctcagcactttgggaggccaaggcgggtggatcacctgaggtcaggagttcgagaccagcctgaccaacatggtgaaaccctgtctctactcaaagtacaaaattagccggatgaggtgtctcatgcctgtaatcccagctactcaggaggcctgaggcaggacaatcgcttgaacccaggaggtggaggttgcagggagccgagatcgcaccattgcactccaacctgggcaacaggagcaagtataataataatttctcaaaaaataataataacaataataataatgaggtttaaaatgtgctgaattagaatgtttagtatatagacttcttgccatatattgtattcatagttgatttttgtttacatcatgtatcctttaataagacactgaaatctactttaattcagtacaaaaatactttggacttttgtaattagttcaatagatatagctaataggaggaagaaataatctgtaggcttgaattcactaatttacacactgagatatacagaacttttgagcttaccaaaaaataatagggcaaattgatatgtactgacacagagatgtgttcatgaaatattttataatgaagaaaaacaagatgcagaaaaacacatatactatggttttattctcgttaaataaacagaccatcatcctgaatatgtgtgtgaataaaagtctaaaaagacagaagcaaatttatattgatggttatttctttaattttctattttctgtatctttaacatttgttgcaatgagatatgttattttgtaattaagtatatagcattaataaatctattatgtaagcttgtaagtttgaagagagtgtaacaaatttgtgtaaattcacatttatttttatatacagtgtttattataaaaatcaactgatttttttacttgtatttccaaaagccaggttttatagtaattgattatctctatttttttgtattttatcatcattattttattgattccatttactttgggtttaatttgctcttctttttaaaatgtcttaatatggaaactgagatcattgatttaagaagcttctctttttgtactataagcattttaatgctatacatttacctctaagcaccactttagctgcatcctgcaaattttgatatggtgtatcttcattttaagttaattcaaaatatgttctatttctccatgtgattttttttctttgacctgtgcattgtttcaaagtatattgtttaaatttcagatatttgaggttgttccagattttttcctttattactttctagtttaactctgttgtgtttggagaacatattttggattattttaactttcttttacatttaatgaaccttttacatggcctcagaatatagtctttcttggtaaatattctgtgggcacttgataagaatgtgtgctctgcttaagtgaggtggagtattctataaatgtcaactaggacaagttggttgaaaatatggttcaagtctaatatatccctgatgattttcagtctacttattcttttagttaagagaagaatgtggaaatttccacatacttgcaggttatctatttctgttttcagctttatctgctgaaattacccttgctccaggagtttaatgctttataatcatgcatgcacagttagcattatcatgtcttcttgatgaattgacccctttgtcattatgcaatgtccatttttatccacacactttattacttgtcgtgatgagtactacttatagtattaacatagccattccagatttttttaattgaattcttaatatatctttttcatctctttactttttaagatgtcaaaggagttttcttgtagacagcctaaaattgagtcttgctttttaaaaatctgacaatcagactttttaatggaatttttcgtaccactgacatctcatatgattatcaattttattgtgtttaaatctgtcattttactatctcgtgtctgtctcacctattctttgttactctttttctctttgcctgactcttagattaatagtgtatattcttgtattgcagtttatctccacagttggattattagctatatctctgcttattttttagtgtttatacgtatttaacttactacattctattttcaaatagtataatattattatgccatagtttaatagtatactattatatagtatactatataattatacagtatactattatatagtatactatataattatacagtatactattatatagtatactataaattatacagtatactatatagtatactatgtaattatacgtatactatatagtatactgtataattatactattatatagtataatagtataatgccacttcacttataatgtaataactttacaatggtaccatttacctcttcaatttttcatgttattgttgttatgctttttacttctatgtgttataacatccaaaatacgttattgttgttgttgcttggaaaaatcaattctgttaaggttaattaaaaaataagaaaatatattttatctctattaacatattaccattcctactgcttttcattttctgtgtgtaggttagaattttaatctcacttttattttacctgaagagcttccttttacatttaaagtccaaaaattctttattaatgcttcgtgaattttattatgtcaatactaaggatttctgttcctatgtggatgaaattaatagacaatttaaaggataggatgataatttcaatgtctaaaactgaaattttaaatttagagtaagaggacgacaattccaacaattccaatataagagtgttcaaggaatatagacaactttcacatgaggaaataaaaaagctagtaagtgtaggagctagtaattagagaaatgaaaactaaagtaataattagtattcctttacaatattagggtatttataatattacaaatattacaatatttacaatattacaatattcctttacaatacaagacaattaggatattggaggccaggcacggtggctcatggctcatgcctgtaatcccagcaatttgggaggccgaggcgggcagatcatctgaggtcaggagatcaagaccagcctgaccaacatggagaaaccccatctctactaaaaatacaaaattagccgggcgtggtggtgcatgcctgtaatcccagctactcaggaaggctgaggcaggagaatcgcttgaacctgggaggtggaggtttcagtgagtcaagatcacgccactgcacactccagcctgggcaacaagagcaaaacttggtctaaaaaaaaaaaagaaagaaaattaggatattggatagtaatatcatgtattggcaggaaagaagaaatgcaggagtcttcatgaacagtagaggtgtgtagactgctagtggtatgaagactcctgcaggcattctgaaggaccactggacactatttattcattataccctatgatctagtaattctgctctgggtctacagcaaagtgataaagaatctgagtcctcaatgtccatagtcattccacaaagaaacgtagtggagacattcactgtaccattcactgaggttttgagaagctaaagataaaccaagtgcccatgatcaggagaggaaacacattaagtgttctgcagccaactgaagcaacagattgtccacataacagtatggatgtatgggggaacccgcccccaataattcaatgttatttcacgtaggttcttttctatttccctaagtgttggccagtctgagaaataaagggaaagagtacaaaagagagaaattttaaagctgggtatccgggggagacatcacatgtcggcaggtgccgtgatgccccacaagccgcaaaaccagcaagtttttattagtgattttcaaaggggagagagtgtacgaataggctgtgggtcacagagatcacatgcttcacaaggtaataaaatattacaagacaaatggaggcagggcaagatcgcaggaccgggccgaaattaaaattgctaatgaagtttcgggcatgcattgtcattgataacatcttatcaggagacaggatttgagagcagacaaccagtctgaccaaaatttattaggcgggaatttcctcatcctggtacatagtacgcctgggagcactaagggagaccggggcttatttcatcccttatctacaactgtaaaagagagacagtcccagagcagccatttcagagacctccccctaggaacgcattctctttctcagggctgtttcttgctgagaaaacgaattcagcgatatttctcctatttgcttttgaaagaagagaaatatggctctgttccacccagctctcaggcagccagacctaatggttatctcccttattccctgaacatcgctgttatcctgttcttttttcaaggtgcctagatttcatatcgtttaaacaatttgtgccgttaacgcaatcatcacagggtcctgaggcgacctacatcctcagcttacgaagatgacaggattaagagattaaagtaaagacagacataggaaatcacaagaatattgattggggaagtgataaatgtccatgaaatcttcacaatttatgttcagagattgcagtaaagacaggcgtaagaaatgataaaagtgttaatttggggaattaataaatgtccatgaaatcttcacaatttccatgcttctgccatggcttcagccggtccctccgttcggggtccctgacttcccacaacaggatggatcttaaaaacaaaattctaaaaggaaaattaagaaacaaactaagatatataacatgataccatttacataaattaaaacatatgcatacaaaggtgttttacttctctaaccccactctcttgagaaaaactgagtttcttagaagaatgtttatataaagtttttatagtaaaaaaaagtatagatattctgaaaaccagtgtcatctgtgttcaaaatgttttcttcttgcagatgttgatgaatgccaggctatcccagggatatgccaaggaggaaactgtatcaatacagtgggctcttttgaatgcagatgccctgctggtcacaaacagagtgaaactactcagaaatgtgaaggtgagtctctctactttgggaagcatgcctaattgtgactttaatgcaagaaaaacaggacttcatttgaaattttgaagactactggtcacaattaaaactctttatctactatgaaagcataggtttaagcctagagtagttctgtgtttgtgtattgtagccttagtgggtttgatttgaaaagagtcaatgagcatttgcatctagtttgttatctcagttgtgttgcattgagaatgggagtaatccagccatttatgtttcttcttaataaagtaggtttccatttcacttataaagttatatcaaaaacgaaaattgagatagaaataagaagtccaagtgaaatacagtatcatgtgtaaatgatgtgttagtagttggcaccgtgtcatatattataaaataaaatactctaattggtatactgaatattgtttggccatcaaatttttttaaatggattattgattcaggaagggtttggaaattaccactacaaatatctcaataaagaatagcttgctcaaataaagatatcaaaaaacctaatacttttctgcaatattaaatatggattataatattgaaatgtaaattccattagcagttcttaatagaataaatttatttgttatatatatctgtgatcaaaacctgtatcatttttataaaattcaagaagtttctaagtgcatgtggcttcaatgatcatggatatttagaatagttttgatgattctagtagttttgatacaatgtttatcttttcagttatgttacttaaataaatttatttcatctaaggcagttttctaaaggcaatagagtataactgttctcattttttgtgacataagcattatcatcaagtcaaattaagtcttttgctctttctctttccaaaagtagtttattttttgttgattggttgtaaacagctgcattcctctttgtaaaaaagaaaatgggaagaggcaaaatctaaagtttaattatagaagataaacagcagtatgaactatattatttcataagagatagaatgtgggtacatatgccattgtttcaatgccagaaaccataatcttataaatccttgagacatgtattatcctgttttttttcatttgccctggttcatgtatacttagctccaaattaattgttatagttatatacattttatgtaattacaaattaatttcatgctccctctaggaagaaagtttaaaaaaacatagttgattattttaaggaccaaataaattctctgtgaaattgtttacaagaatgcccaagtgtcttatactacttaaatacactgtcgatagtcaaagtcagcctgtagtggaaaggtgaaagtaacacttggaagacatgaaaaaatatctgaattacctgaagaagcacccacattagaccaaaaactcagggatctgcagaaattctgggttgtgctgctttttcctggccgctttttgtattttttctcctggctttttgtaagttgattgtgttgctcaaacttttctcactccctttcactttttacttctggactaatatctaaactagatgtacttgggaacaaagtttgattatagatgagaaggcacagccactgactgattatagtagttgtgacatttctaatgcacatcgaacaatgtatttcttcttagttaaaaatggaatgaggcttttctatgttacatttcatcaaagcagcatacagagccaagccagacatgggagaaagacagtacaagtctttattcaccacttgcctatgttctttaggaaagagggacattgatagcacgtaggcaccacccaaagccctgaatccagtcgtgcctttctttgcttcctgcccaggcagccaaatccatttaaccattgcccagaaataattatgtgatttaatatttgggattggtggggaatagcagaattggaagaagtagtgattagaatttgaaatataaaggttttatgaaggccttacttgtgtataaggcatatttatttaaatatttcttaaaagcagctattttcaattttatttgggtaatattgtttctttatataaaagaacaagtgggccgggcgcggtggctcacgcctgtaatcccagcactttgggaggccgaggcgggtggatcttgaggtcaggagatcgagaccatcctggctaacaaggtgaaaccctgtctctactaaaaatacaaaaaattagccgggcgcggtggcgggcgcctgtagtcccagctactcgggaggctgaggcaggagaatggcgtgaacccaggaggcggagcttgcagtgagccgagatcgcgccactgcagtccgcagtccggcctgggcgacagagcgagactccgtctcaaaaaaaaaaaaaaaaaaaaaaaaaaaaagaacaagtgatatttgcttatataaaactatttaatgtaatcagtagtataatatatctggaaaaactataaacagttgctacacttagtgacaggttttgaattgtagtcagttttatggataatgtagtgtctgtaaaaatcttgccataaatgtaatgtttgctctaaataaaaatataactatagcaattacttttgatcaactatcaaaggtaaaatattttaatttattatgtgaattacagtgcaaatataaaacatagtactattggcagatttaagatgatgttcttcctgtttttacagtagcacatttcatgtttctgctcacacagcaattaaattctctttaaaaaccttttttggtctttaagttactaggtctgttcagaaataagaaaagtaagttcagtattttgggtctgagtaattaggaaaatggtggtatccttaacaagaaactgcaattagcttattaatcgttaaacattatgttattgatattttctgtgtgtatttttttgttaactatctcactccaacccttgaatgagatccttcaggacagagcctctgtctttagtgctgtatcccagagcctagaaaagtttagtaggctccaaacaaatatatgttgattaattgagagtaggatatataataagttagtttatttgacttgggctgaaggtccaaatggaaggtaaaatgtgggtccagagttaaaactgaatttggaaagaagctactggtcttcctcaaaggaatttttgcttcatcttagcattttttgttttgttaataatttgattttcctttggttgccattgagagatcaagagcatgtaaacattaaatgcagtttcaaatgtttagatcttctgtgtcatggttcctctttggtcacctgcaggtaatgcttctgatgtcaaggacctttgctttttagctaaaagaaagaaatgtcttctgctcattcactgtgatgtcttcttaacagaaatcttattctgaaaggcttattctgccaaaaaatcaagtttgagcatatatagtttttattaaaaatgttttaatgctgggggcagcattcatctcctaacttaatgtttgaaacatgtctgtcactatctatcatggaggcttatgttgtttgattctcctgcgactctttttttccctcatattcagatatagacaactaggtaagctgtaaatctgaacccaaagcagaaagaaatacatatttctcccttttcctctctctctgtgtgtgtatgtatgtatgtggtgtgtttgtgtgtgtgtgtctgttttaaggagaaccagttattatccccctttgctcaattagggtcctggatctcaaaaaaacctctcatgatgctcactgcagccatgtttatttctgctgtgccagtttggttcccaaatctaatttcctaattctgtaatacagcggataaaattattctttggtggaataaaccatttcttcacatgcaaagagaaggttgtttcagttaacttcctctgttcaaacatccattaatttaaatatccatttaatttaaatgaagaagggaaggagaacacatcaatataatatgaaatggtacactaaaagacagctcagcgtttttcttttgtacaataaagtattttcgtttgaatttcagtccatgtggataaagcacaagcaggagccagatgtccttgcgtgatcctcccttccagactataccttcgttaacattccttgagctagttattctttcctggcttacatgggaggcagaaaaagaacatcattgtattggaaagtttcccttaaatggctctttatgtggcagatagttgtttgcaatttagtttgaagagttttcagctttgttccattaacacagcattttgttgtttgagacttgtgacaacaaatatatttatttaggctcatgaaactcataaaagttgttggcacagtctcctctgctgctgttccaactctgcttagataaaccatggaaaataaactttctgtactaaactgaaaagtacttgctcttattcatattacataaagtatattaattttaaaataaataaaaataaatccattaacattctcaaggggaaaactcattaaaatggagagtgaagcaaggggattgctaacattggaaacagataagactttttgggtcataaatttaaaaaccatgaaaatcatcttagcttaatttataacactgtagttaaaacatatgtattccctctctcttgaataagaaagtcaggggtgctacactcaaacctgctttctgcccccatcacaaataatttattcctcacttaccatattgtatctgaactatttttcttgcctgactctgccagcaggatatatgtaccaaaataaaattaataaaagctgtattaattgaacattttctatagtccagacaatatttaaactactttacatgggttatcttattaaatcatcaccacagagctgtgaggttagttactattattaactcaccttagagatgaaaaaactgaggcacaaagaggccaagtaactttcttaggattatatggatgagaaacagaagagccagaatgccagtgtgctagattgactccaaagcttttgctcctagccagtgctattgagcaaacaaaggtgttggatgaccaggcggcacacatcccagcctgggactgcactgacggggaaactcatggagacagcagttgcagtaagagtgtgattctccctttgcccattgcattttgtggtagtaccctggccagaatctaccaaggctggaagtagatccagtttaaagatcctggcactggctgtagagattataagctgcgtgattggaaaaagcatcatctgtctgccctgaaaaaatgaaggcaaaaaaatacagagccttgaccttcatttctgtttcttcacttgagccttcctggttgggagaactttttatttgtatcgtcagggattgcagatgtatgacctggcagttcactggctccaacccaaatctactgcttcaggccccctccccagattgaccaatttaagcactgcactcataatagctggtttccatggagccttttaagaagttagcccatgagggctaattcctgaaaaagtaaacgtttctctccgaagtattctatgccgcctctctggctgatatgttagatattcagttaagggatttttgttatattttctgttaattaaattaaaatgtattctgtgcctaaataattcattcattatgactttagaattgtaattgcaggtcttggaaaacaaaagtaggtgtaagaaagtggaactgaactaattttatctttgttcacagaaggtagttgatatggcttggccctacgtccccacccaaatctcatgtcaaattgtaatccccaatgctggaagaggggccttgtgggaggtgattagatcatgggggcagatttcttccttgctgttctcgtgatagtgagtgagttctcatgagatctggttgtttagaagtgtgtagctcttcccccttctgtctctctttctcctgctctggccaggtgcctgcttcctgttcaccttccaccatgattgtatgtttcctgaagcttccctagccatgcttcctgtactgcctgcagaaccatgagccaataaaataaaactttttttctttatatattacccagtctcaggtagctctttataacaatgtgaaaatggattaatacaggagtcagtagcaatagtctaaagaaatagttttaaaatagccaagagtgtactttactattcctatggaaagataagacagcaaaatatttgaaagactggagaacaggacattttagatactaaaacatgttataaagcgaaaatatttaaattactatggtactagcatgtaaatagcccaatgaaacacaatagaaatttcagtaaaagttgaaattgtgccatttaaatcaataagggaaaagatcaaatatgcagtgaatcatgttgagatgacagggtattatttgaaacagataaatttggatctatgtgtcacatcttataccaggataaattttaaatgaatcaaagatacaaatattatctatacaattttgtataaaatattatgtatacaaaagaaagtgatactaaaaataatcatgagcatttttatatagtcttagacctgagaaagcatatttcagtgtgttggccacttaaaagttatagagaaatagattaataaattcagttacataaaataaaataaattacatggcaataaaagaaaaaaaaattactaaccagaaaaaaagacaaatgctaaactgggaaaagcatttgtaactcataacacacagaaagacaaatttttctagtacaaagagattccacaaatcagtaagaaaatatccaataaaatgttcaaggatatgaattgactattgatggcaagggaaataccagtgactcgcaaaaacatatttatccttatttatataagcagagtgtatttagaataagagagtgtaatataaaactgtgagacactattttttacttctaaatgttgataaaataaaaattctaatggcaaactgtattggtgagggtgttaagaaatagacactctcacaaattcctgataagagtataaaagtgccctatatagagggcaatttagaaatatctatcaaaattacaaatatccatactataatatttaatcacttagttttaattctaaaaagttgttttgtctatactcataatcaagaaatgatggattttaataaggttattccttctgtcttttttttgtaatagcaaaatatcatagacctatataggatagtggactgattcaattaaaaacatgcacacagtgggaaactgttcatccttacgaaaagatagcagacactttatatattgatataaacgtatgttgaaggtatattgttacatgacaaaggcaatttgtaaacattttcataaaaaatattaaaaagtgtgtgtgtgtatgtgtgtgtgttaatgcatagaatgtccatggaaggactagaaagtctgtggcattggatattgttgggggtgaaattgtctggcttggaaaaaggaatggagaggagatttcacattgagtgccctaacctaagtttttgactttgaaccatgtaaatgtattacttattcaaaaaatttaaaacagagagtaaggttgggggtgggaagacccatttatttggcagtttttttcttgagccctcagtgaatttccgtccagaactcttgtctccccggaacaatgtatacaaagctgttagagcctctgtcacagggcattgcaacctttatcccccagaacagtaggtacatctatggcacattatgtgctgccaagtagacaatatatgcacatctaaagcttactgaatgtgggatgaaaatatgggacctttccacttaccataaaactattacttttataaatcaataaaagtttaagagtgtcaaatgaaatgtgtttgattttaatgatcctcccattaattgctgtcagagaaaaatctcattaaaatatatttagtgacttgaagtaaaagtaaaacagacattaagggacagatcaaagatggttattacaatgaagctgattataatatgcttttggaaaaaatacaagacttaaatgggtgaatgtagccgggcacggcggcacacacatgtaatcccagcactttgggaggctaaggcaggcagatcacttgaggcccggaagtttgagaccagcctggccaacatggtgaaaccctgtctctactaaaaatacaaaaattagccagacgtggtagtatgtgcatgtggtcccagctactccggaggcttgaggcattaggatcacctaagcccaggaggcggaggttgcagttacctgggatcatgccactgcactccagcctgtagtagtcatgttatgaagaaaagagatgttgttaagtcattttgaaacaaaaagctagtaaaatcctggtcaccaactgcaaacaaactacatggcctactgaaattaagactttcaaaacagaaaaacagatcaatttctttttcttttttatgatgctttcatttatttatttcagcatttctcctgtctttctgtctgtctgtctgtctgtctatctatctatctatctatctatctatctatctatctatacatacatactatttatctatctatttatctatctagactactctctctatatgtggtgctccccttttctctttcaggtgcataatattgtattaatcatagtatttgattcatgattcttattattattgatccatgacctacttttgctttgctattacaatgtaataagcacccatgaagccaccaaaaccaaaagctaggaccatgacaataacctgcatctacccatggtggttatgaggcccccatataaccatcactttgtataggaatctcacattttcttgttaatttttagataattttattaaatctagagatactccattcatcatcataatcattattgcagttgttaaacgttacaaaagagttttaatgctgtgtggaatttaactttttcacttcatattataatgatatgattgatctatgtaattgcatgctgctctaattcattctttagagtgggatacaatattccattatgtagctataccatagcgtgtttgtcagctttcccattgatgggcatttgtttccccatttcttttcattgtgaatagtattcaacatactttcaggtacaaagactctgtgcagtgttgtaccaggtatcttcttcaaagtagactatgaactccaccctggagcgagtcatttggattttcccaaggaatatgtctgtcctgtcttttgatctcttcattaccaaaaggtgactcattcacatttctatcacgagagatctctgtgtgagcagcttaggtcatagcaatgttagcatgctggagccttgttttggcttactgttgctgggtgcctgattgaagaacaaagagcttgatattccccgcagttagggtgagtgatctacatctccacctcagcccaggactgtgtgtctcccagccctctgtccagattggtgagggaataactgccaagggattctgccctggcttaaaggactttgtcttctgggttactttttatgtctcttccatgaggcgctggacacatcgttcagattaggaaatcatacaggagaaacgaagataccgcaaatatttccatacttttttttctttttttttttttttaagtggagccactgggtttaagaatcaaagccttttttgactttttcttatttgtgctaagcaaaaatgacatcacttagggttaccgttttcctatctttctccatataaaatagacaattacttgtaatccaatgaaagttctttgcactaaggaatctgctttttatgatacatttatgttgggaggcagagcatagagtagtttggaaatttagtgcagagtcatttggagaatatatattaacagttaaaatgtgaaatggaaatttgaagtatgtatgcttttataaactatttgggaagggcatactagcagtgatatttttagtctgatttttagaagcccatgctgtgtttcataaatggaaacgtcacatccaagaaagtgagaccagcggggaagagtgataggaactccagaggggcagccaaacagcagctcagagctgacatacgaggcaaaatgagcacttagcacctcctagcatatttatcagaagttgccaatctaaactatttgagtttcttcccacaaatggcgtgcactagtaaaacacatgtgttaagcaacttggacagcaccttgacggtgttagttaactaacagccatatttcatggggaattactgaagtgacgtcactcctttaatttcaacctaaacaaaactgtttacatggaaagttgcatgcataggtttctataaaagtctagaccagaaagagttctttatttgaggcacagtgggtaacatcattgtcataaacatgaaatctgtgaaaaaatacatattccaaaagaaaattattcagcaaaaggtaatctttggcatgtgaagacaggctttgatctggattgtgatctggagcaaagtttgaaatatccagatgacattttaactttttaaaaatctattttattttcaaacatatttatcccagtaacaagaggaaaattatagagaaaaatgacaatttaagttttcagtaaaattaaggaaataaatttggggagggaagagaacatttgggacccaaatgtccatctgtgctcctgctgcaccccatatgaattgtgtcatctcaagaaaattaatgcctgcatctttacaataggaataataatggtcttttctgcttaaggtttttatgcataacatataaagcatttgacactttgggtccttgttaaagacaaggatagcaaagaaattaattgtggaagagttctgatgtgtaatttcagtgatgacttttagtacagtttctaataaataaattcttttaaaaagctaacaaaaatcttgaaaataacacagttgacttactagagcatatatttgcctagtctgatgaaagtattaacaggcaatgaaatgaccccaagtctatcatgagatgagaaaatgtggaactagggtatccattaattcctgactggtctcagcctgtttttattcccctgctccagttccacctaaattacagcaatggagagttaagacccagagggcttgatttatttaacataagacagtggtcaggaaattgcactttgatggattcaggaaaaatttcccaaatgctgagaaccaatgttgtttccctagtgccattgtatgtttaaattctttttttaaaattatgaaaaaaaagcatggtaaagtaattcacatgattcttgcaattcagtgtctgctaaagatgactggaaaaattgagagcctccaagacatctttctcagagacataaaattagatgtgtgttaatgataggaaaacctattctaccctgaatgaaaggatcaggtgaacattttgttgaactttgccattagaggaaaaaggtatctgaaatattgcctccctttcagttactaaaaaattgctcgataaatttttattttgcttaacatataatagccatttcatagtagaatgaaaaaacaataattcaggccaaaataaaatgcaagttctataatattcatatgtatctttatattctcttgacaaaatgaggaagaaagaaggagagggacagggaagaagggtaggaggaagagagagagagagagggaacctttctccatctcacaaattaccttggctcagtgcctgaaagaaattagtctactctaaagaaatcctgctgtagtcaaataaaaatgtaacaaaacttgaaatgtaatacctagatccaagactgcagttctcgccagtgctgtcacttactgcccatatatacatatatatatatacacactttattcactgccaggcattgaaaaatgtatgcaggtctggagacaaatgttatgggctgccatttcttttagatgcatccttgggagtatattatggcaggatgtaaataaacaaagctgtgataatgcttgaattgtctttctttcttaatcccagactaaatccccttatcttaatgcaaacttttcttattttaatatagtgtttctcatccatactttgcctttactggattttagtacaaataattatattttaaggataatatgaaggattctgagaattttagttctagtcacctgctgtattggtcgcaaggttaggtaaattgtttctccatgtgccagtagttgttttacctgcttccagaagacagctatttaaagagcccttattttagaagacacaaaatcaatataaataaacaaatttagttatagtatgagaaggtttcttttaatgtcatacagatactgagtgagttgctatgtttttatgtaagctttgattttcctagagggctgtggtttcatatttcacatattactgtgtattttctagtttaattataaaactatctgaggtatatttttgtcccagtctagcagcagctaacataggacaaatgaagggttgggttgcaggtttgtgccttttggtgaacggcagaggaaaatttgggcattattaaccaacagctgtatgctatcaaattaaattttgcatagcttgatttaactagccatatagctgatgctaatctgaagcgtaaacatattcttcagctataggtttcatcttccaaattctcagaaatgctaccaggactatgtgactataaatcaaagctttgcttttcccattagtaatagtgcattataataatctattatgttttattacatagaagaaaattgctttttgtattgttcttacctgttttaaggattatagtaaaaacctcttatgttgcaaaatcaatattaagtatttgaatgttataacaagtttgtaaaagagaggatcgtaaaaattatttatcttttagtactgcagtctaacttcaaacttgtatgttgaccaatattttccaatcctctgatagaggaagtaggccttcttttagaaagtggtttcccaaataagttcctgacctgccattgttgtgtaaacctcacccaaatgctctgatttccagtttcatttctttaaattggagcaaacccctaacatcttttttttaaggcatctgatatggtttggctgtgtctccacccaaatctcatcatgaattttaatccccataatctccacatgttgaaggaaggacttggtgggaggtgattggatcagggggtggtttccccactgctgttctcatgatagtgagtgagttctcatgagatctggtgattttataaggcagttttccctgctcttgctcagtctcaggcttactctcctgctgccgtgtaaaatgtgcctcttcttctgccatgattgtaagtttcctgaggtctcggtagccatacagaactacaagtaaattaaacctcttttctttatcagttacccagtctcagggagctctttatagcagtgtgaaaacagactaatacaacaccctaaatgcaggtcaaaataaaatactagttttattaaaacttttttttatcacttatgactattaaaataaaatttatttgtccacagaccacctaaagtcatcgagccagtcactaaatgcagtctttctagatccgaacactaaatgcagttcttctagatcagggcttggcaaacttttctgtgaagagccagatagtaaatattgtaggctttgcaggtcatactgtctttgtcacaaatagacagctctgccagtgtagtgcaaaatccgccatagacagtaaaaacgaatgagtgaggctgtgttccagtaaaactttacttacaaaaacaggctgtgggctgtagtttgccaactcctgttcttgatttcactattcttactctgtatttcaaatggtgtcaattttacttaattttaccactattttcttagtgactggctagttgattttaagtggcccacggacaaataggttttattttaatattaataagctataagaaaaaaatttaagaaaaaatacaaccagtgcatcaaaactatgtgtttatgaatgttattcctgaaaatattattgattatcccaaagttcatattaaatttttaaaataagtatacatgtagaaatagagagatgtaatttaaatgattcagggtatttcaataggtatggaggtgaagttttaaatgattggagtttgggacatgttattgtaagatttatcattatcatcattattattacagtagtccccttatctgcagtttcactttctacagtttcaggtacctgctgtccactacagtccaaaaatcttaatggtgaattccagaaataatccatatgttttaatgcgtgccattctcagtaaggtaataacatcttgtgctggagatgtgcctcatccatctgtccagcatatccatgctgcagacactccttgcctaggagtcactcagtagctgcctcagttatcagattcactgtcacagtatcttagcgcatgtattcaagtgacccttattttacttaataatgccccaaagtgctagagtagtgatggtaatgattcagatataccaaagagagactgtaaagtgcccccttttaaatgaaaagatgaaagctcttgacttaataaggcaaaaaagtcatatgctaaagttactaagctctacagtaagaatagatttttttatctgtgtaattgcgaagagggaagaagaaatttgtgctggttttgctgttgtacctcaaactgcaaaagttatggcgacagtacatgttaagcacttagttaaaaatggaaaaagcacgaaatttgtgggtagaagacgtgaacagaaacgtgttcctgattgacagcaatcaggttcagtaccatgcatggtttcaggcatccattgagggtcatggaacatatttcccagagaaggagagactgctgtattagaaagcgattttaattcttaaagtaagtgttgtcaaacaggaactcaggatcttattatttttgccagaaagttccaaagggaaaggaatggcccactaagataacaataaatttggctctactgtttttctttgtagatctaccttacttattcccaactatcacctcctattttttctactcttcgttatattacttctctttctaatcttctctactattgtctagactgctattaaaacctgggcattcctgaaattagaagacatgaaattctctcaacattatccaaatcatttcagttgttctatgtttatgagtttgtctacctgtacactacatgggatatgagtcagtgtggcacttgaaaagaagttcatgctattgcaatcagtattttgtgttatttatttatttatttatttatttatttatttttgagacagggtttcactctgtcgcccagactggagtgcagtggtgctggtgtgatctcggctcactgcagcctccgcctcccaggctcaagggattctcctgcctcagcctcccgagtagctgggattataggcctgtgccaccacacctggctgatttttgtatttttagtagagacagggtttcaccatgttggtcaggctggtcttgaactcctgacctcaaatgatccactcgcctcagcctcccaaagtactgagattacaagcgtaagccacctcactggcctgtattttattttttcaatatgattttgcaagagaaaacatataagcaactactgctataggcttagacataaataggttctgttttagacacgaatgtgaacaagaaagaaagtgctttaaacataatgctatgtttgaaatatgaatgtaaaacataaggaagtaagccaaatataacaaaaaagtaaagacttaaattttaaatagaacaataaatgtacaataatacaacataagagaattcttttatgttcaaaatccagaaattataaaagaaaataaatgacatattcaactacataaaagtttaaaaaaaatgaaaaatgaaaaaactactggcaaagacatcaaaaagaatgtcaaaagaaaaatgccaaagaaaaaatatttgcaagtaatatttaaggcaaatgactaaattaaaggcaaagccctagaaataggtaaagaaaatggctaacacctaacagaaaaataactaaaatattagaaggtaactcacaggaaaggaaatgcaagaataaaaaaagtgctttaaatgatatgtgaaaaaagtctcagaggttgctttcttgttttgttgaattctaagtacaacagatttgtagtgcttgaagatgttttgtaacagaaaacttgaaatttgcaaaagaaaaaagttctcatttagctttagtgaaaccatactgtaaaaatttaattgtaggcttagaaattaattcaacttaataaactcgtagcatatcatctttcacaaattaaattatcataatttttctcccacatggaatgtttttcttaatttactatgatagaagaaatatttctcataattaacaagtaaagcaaaacaggaagtatagtatcctggcattaatgtaaaatttgattatacattttaaaatatttcttctatgtcttcattttccttgtttgaaggtggaagattgttattttgatgtttttttccacaaagtataatgttacgttgtgtatagatcctttatgccagtatatataaacactatttgcaatggctagttaattacatattaatatttctacctggaatttaaaaatggtgtggatttcatgaataaaatatattctcaaatctgttcctctttaagaagataattaaaatttcatttccgatttttttaggaatactgctatactgtaaaccattgtcttcagtatttgtatagtgggtgggcagtaggagtgggaggagggagaacagaagtgacgaaaggaaggggaagactgttttgcctttagtggcccatcgctcacccccaagctgtgtaaaaagagaatccttaaggagattgaagagaacggtattggggatcttttttgaaaagtgtcatccatgaactagagtgtgggagagggagaaggtaaggagtacagcctgactcacacctggaaaggctgttctgcgtttccagagtttgaaaggcagaggacatgtgagtttcccatctgccaggtgagggcctcacagaaaacagatgagttgaattgtcctgagaggggctctgtccatgcaactacctggagggtggctgatcccagcatgaggataagctgtcaggaacctggggccaatgagagtggccaggtagaggagttattatccctagaatcatccgtgagaggtgagagaccttaggattaggaggattctcaaaacacactaggctttggacctgccacacccagatgacactgataccagaatcactcatacaaaaatatatttacggagttccgtcactgttctagaccctgggaatagagtaatgaacaaaacagatcaaaatctttgctttcataaagtctacattatagaggcaagagacagtaaacaactaaagtctgtgctatgtcagaaagaaaataaaacaggatgagagcctataaaatgctaatgtggtgtggaattttaaacaggcaaccagggaaagtcactgacatggccttatttcagcaaagatctgaaggaagtaaagtgataagccagggctgaattcctgatgggggccagcaagtgcagtgcccctgaggtagaggcacccctgaggtatctaggggacgacattaggagtccagtgtgactggagctgagcactaaggaggagattaattagtaagagatgggtttagagatgtagtccagggccaaatggggaggggccttgccagccacggtgcatactttggactttagtttgaattctcaaggatgggagctgttagagcttttcagttaagaagtataatattctgaccttcattttggaaggtttactccagctgctgggtagtaacaagataataagggaacaagtggggaagcatggagaccacttgggaggctcctgcaataatctaagtgagacttgatggtagcttggaccaggggtttttgtggtaaaagtgatgagaagtggttgaattccagatgtattatgaaggctgagccagaagaatttgttgacagatcagttgtggggtaggaaaggaaaagaattgagtaatttcaaagtttgtagaactgaaggttgaaattgccattaactgagatggagaacatctgtggggagaacatagcgaggagaaaagttatcaggaatgtttaccgaaccgaacttgggttcacctgcccaatgcaggtaagccaaacactggcatcgagattgcagcaaaagaaaatgaggcatttattgcagggtgcccagcagggaaaatcaggcagctcgtgcttcagacccggactctccaatggcttataggtaaggatttctaaaggcaggaaagcagaagttacaggcaaagtcctaagtcaatacatggagcttatacattggtttgactgaaagaggctgggtatcttgaaccaggggcttacagaccataggtagagccaaatattttccaatttgcaattgattaataaagagcagctttatttaaaattgaaatcagcagaaaagaatgttagctctggcacgtgggcatggctttctccaggtgcctcaagaagaactttagaagaaagaatggcggtcagagttcagtcctcagttccccttggtctgaggtctatgtgccagcagatccttttggtgggggtcagggtttctgaaaaacaactcagggatataatggtaaggtgctatatttagtttctatagagaacaaaaatctcattattctaacttccttggttattgttttaagctactattaccttcttgcttattaagttgctcatttacttctcaggactagctatgtgcctggactttctctcgaaggaactcaagattatcttttatttccatgcttggtggggcagtggcaggggggtgggcagaagctcaggcccctacgagggatcccacctccatctcaggagcttagttttagagggttaatttgagacatctgttagacagctagatagatatttctaattgcatatatgagtcaagttcaagggcaaggtcaaggttggcaatataaatttggaagtcttcaacttagagttggtctttaaagccatgagactggataaagtcagtcaggggaggcattttgctagagaagtccaagtgctgagccctagaacatttcaacatttagaggtgcaggagatgagaaagcaccaacaaaggagactgggaaggaaaagtcagggagattatagctccataatcaagaaagatcttcgttcctagtacctgtcctctcacgtccttactgcaaccttgaaagtgctcatagtagttgccagctagaaagaaaggactggaaagatagaagaaagaagacaccatgccccttcattactgagggcttctgagcctgggggatgctcaccctaggaagaagggaagctttaactgaatgaaagattagactgttagatttgttacattttatttatctgaaggggattggaaaacctgtgtgaactgcatgagatttcctagggtcaagaaagaactggtcaagagagaatatgcaaaacagcagtgggagaaatagttgctttctgcttgcactctagcagtttcaaatacccatttaccatatattctctcagttgacatgaaactattcaaaacactttcagcttcatgacttatcgtcctaagtctacaggcaaaagtttaacttttgcataaatcatcaaacagcaggtgctctgagtaacttaaggaaaagggaatttcaaatatgaaggttttcgaagtctcggtcaagatctctgaagtgtgtgggcgcacttgagaattgtccagatgtgtaatgtgaatgtgtctgtgctgtattagcatagttagagtgtggtcctaatgaggttcagccacagaattggtagtctccccattcagctattttgaatttgtcgttttgcatagagaatgccagtgaatggcttgttgggtttatgcaattccatcaccccactgagaacatcaaagtgtgtggtttacaggcaaagcattaggagtgacttctccctactcacaccttcacacgtacaggacctactttatgcatatacacagctaggtctatgtagttcaatgtatatgcagctactttttaaatttaaatagggtacatatgaatgtaaactgtcaagagaataagaaaatcaaccaataatgagaaaattcaactctatgaatttgaagattaacattcttcataaaaattgcacatgtatgtgtctcagtgaatgagggtaccattttcattgagtttctttctttttatgatattaagtgtgaaaaacacagaggctaatgctcatttatatgataattctatagtggaatgtagggtggatttctttttcatttggtgccatttatttagaagatacaaaataaatgatttttagatgcatcctcagagtactgataaaagatcaatacttcttaaattaatgttcttactgcattatgcaaaaatttgttttaaaatcctcaggattttatgatcacaccttcatgtactgatgcttaatgggaaaatattaaattttccctattaaatactacattccaaattctaaattcttgcagctttgccaagttcaaataagtatagtaaatttaactttggaatttcctgacttttgcattgctgaaattttagattttgcccaacattaagggagtctttcaatttaaattccctttatttaaaatgtttagggcaattgtgaaaagtgaggaaattggatgaaagaaattttctggaggacatggttttcacagcttgtcacttaattgttaaaaaatattcccctgtaaagcttagtgtcattatgttaagtcttcagtattttaaaacataaataacttgatctcacttgtcttaaaggtctatgttttaagttttaagtttgtcctaatgtgtcttaaatttggactaacaaaaggtgacaaaatacttccacttgagtaaattacctccccccgaaaaagacagagggacagagagagaaaaaaaaaaaaaggaaaaggaaaagagagaaagaaaaactactgctggcaaacagctatgccttccaagaaatatttgctttggaatgcagaccaaatattcaaactcatattgtttgactatgttatcagtaacttttatgtattttgaaacagagatagctttcagactgttataatgttaaaaagcactgtgatggagctgcctcttgccaccattattacttcatgcctgagttactgcaaattagtgtttagaaagatgcagtattgatttcaggccaaaagggaacctttcattactttgctgcagtagtagcctttcaaaaatgcaattattcagcctaagtgaacaaaaagctcttaattaaaaagttcccttagttcctattaatgataacaaagactattttcaatgtatttccttagactaataacaatagaaaagagggacaagaaagaatatatattgtactatagtaaaatcctgaaataatgcaaaaataatgatataatgtgacagaccacaggctttcatcctctgcataacccttgttgttttccatcattctaaaaaatatccttccctttctatcttctccttgggtaactgccctcgcttttccttcttgttcacatcaaactttggaattatccctaatcattctctgttttctttcttctgattaactcccgaacaccttctaatctagggattattctcaccagtcaagtgaaactaatttcatcgatgtcaccagatggaccttttgcattttttatcttactgaaacatccctgcggaacaatcatctataagcagttggctcccaaaactacaatacagctctctcttctgagttccctacctttgtctggagctgcctgccaggcacgtatactttaaacatcccacaattatctcaaactcaacatacacagactgagtcttcagctccactacacccaccccacgtataccttatcatcatttctcacgttcatcatgacagtgattggcacaattattcattctctttcccaagttataaacctgggtacaaatcacccattttatcatcaagacatttaggtggagtctaaatatatttcctaaatatattttgaattcatccactttcctgcctttgtcactaacgtctctcttctagatttctgaaacagctttccttcaggactcctatctcctacatgttccactgcaatcctttctccacactgcagcacaactacctttctagatcacaagtttggtcatgtcactttcctatgtggatctcccattctcaggataaagttcctgcctgatcattctgtttacctctccagcctaacttcttttcacacattctgattcagacacaggtagatttatttagttccttcaataaattatgctctctcttgctttgtgatatggtttggctgtgtccccacccaaatctcaccctgagttgcaataatccccatttattgtgggagggacctggtgggaggtaattgaatcatggtggtgggttttctcaagctgttcttctgatagtcaagtcttatgagatctgatggtttgataaaggggagttcccttacacatgttctcttgcctgctaccatgtaagatgtgactttgctcctcctttgtcttctgccgtaattgggaggcctccccagccatgtggaactgtgagttcactaaacctcttttctttataaattacccagtctcaggtatgtctttattagcagtgtgagaacggactaatacacctggcctttgtgaatgctcttccttctacctggagaagaatattccatttgattttcatggcctgtttatctgtttcaatttaactgtcactttcccagggaagtctttcctggcccctttctcttctgcattctctcactacctttcactatttctgctgtagaatttatctcaccatattgtcatcaggtataatctcagtctcttggccaccactgacggcttctggagaaggagtccaactagtttcagcttagctcactgtttttcaatactatttgtggtctaaagaaatatttatcttttattttgaaaccagctgcatctttttttgtttttctctttttatatgtcatctgtcagtgctatgtgtttggaaaaaaaggatagtaccaaagctttttgactggaagtcaaaatctgcatgtttaataagctgtccatgtgattcttacacacagtaaagttttgtaacatctgtactctgttttactctcttgagaagagtaaaagatatctgacatgaacttactcaacttcagttctattactacatattcattctccatttcccctgtctttgatgaagtgtcttcacatttttccagagcaaaatgttccagctctgcacattaattccatcacctttctgtactccttttaactcttgccattaattagttcattttctagttgggatctcttctctttcctgactcttcctctttacctgcaaagccatcctaaaacacattaaccataaaaccactctttcaactctttagtcacttctcactatactatttcttgctgcctttcttcactgtaaattttcccaaaagcttagtgtataccagttatctcaagtttctacttatttcttatccttttgtaaaattgcttgtgttccctagaatccctcattgcatttggtgttcttgcttattctgtttcttcttaattgtttttcctcaacatactagtttctttttgctgtcataacatgttgccacaaactttgtggcttaaaacaacagatttattgtcttacagttctagagatcagaagtcagaatggtctaaccaagcccaaatcaaggtgttggcaggattacattccttttgaagtgtctagggtacagtccatttttttgccttttcaagtttcgagaggctaccctcgttccttggcttgtggcctcttccatctttaaagccagtagtgtagcatcttcaaatctgtctctcaatctgacactctatttccttgttctactgataaggattcttgtaattacattggacagaggaccagataatctaggattatctctgcatctcaagatcagctgattaacaaccataattctctttgtcgtgcaagctcacatactgataggttctaaatatgatatcattgggtggctattattctgcctcctgctattgactttcttaaaacgtaatagcttttcagtaatactggtgactctgtttaccttttctttatcttcacttgcttcccttctttcaaatgaatatatccccttaggacttacctttaacgtttttcttctcgtgtgatctcttcattttatattattcatctcaactgattttatccacattgatggtttcaactgtctatacccatagattccaatcaccttgcaaagacttactctagacagtcaacaatttttagatattagtaactcaaattgttaatcatgaagccattaattttcccagaatatattttttactttactgattttattaatattagctcaataatgaaacttattgccatttccccttattcttgcttttactttcaggatattttttcatgtattcttttctctcccagtcccaccttcattagctggaactgagactgtgccatcatctctgctgtccctgacccatttctacgtcagccctgatcatctttatcgacataggtagaaatctttgcctaaagtgaagttctgatcactctccttgcctgcttaatgatttggtcactcctcattgcctacagtgcaaggacagattactgaaaatggcattctaggcctgtcacttaactttctagttttattgttttctaagtaaatgccctcaggtcatggaaagctgcccatttctcatccatgccttataattggctacctccatactttagctagagtattttcattgtctggaagaactcctccctcctgtcttccttgcatgccaaagttccaccccattctttaggggcctttatcaatcaataactatatctgccaagaacttttgccgattctcatggttgaattgaggtaacatgttgttaatcttctttgatggaataaattatattgtgccttgtttcacatttaggtatttggtatgtggcaaatcaaaggcctttttaattagcaattacttaatgagttcatgaatgaatagtatatgcccaatcagtatctgtttatttgatttcttaagagaagttgagagttttaaagaatgaatagcataattttcattaactattgtttctttttatttcaaacaaaatatttatttaagagatatacccatttatggccatttagttgtcatcggtaagctaaattttcaatgtgtttaaatttcagtctgattcaacccttttctataaaaaatacctttgatcaatgtatatactatagctaaagctaacatttgttttttgaagctgaaggtaaaacaatgataattcagaaatttcataactatccttgccagctttgatgtatacttttatgctgtatgggaaaaaaatcaaaagaagatcctggggattacatttgccccccttcccaaaaacaaattatctattagaggaaaaagtttttatgttaagtggctggtctggaaaagttagtatgccagatttcttgtttataataagaatgtaataagtaagatctcttccaatggctaatggttcatattaaattagaaaacctgaattcagttaaaaagaacatggaatgggaggacaaggctttcagaatggtgatataagcaccttggtagactctctcccaagtaaaataagaatttaactcatgaaatacattttttaaaaaataccaacaatataaagtctctgaaaattgaagaaaaaaatccagccccatatagaaaagactatacatcattgtcaattatcaaattaaccccatataaaaagaagtatacatcagccgggtgcggtggctcacgcctgtaatcccagcactttgggaggccaaggtgggcagatcacctgaggttgggagtttgagaccagcctgaccaacatggagaaacctcatctctactaaaaatacaaaattagccaggcatggtggcgcatgcctgtaatccaagctagtacttgggaggctgaagcaggagaatcacttgaacctgggaagcggaggttttggtgagccgagatcatgccattgcactccagcccgggcaacaagagcaaaactcttgtctcaaaacaaaaaaaattatacatcagtatcagttgagatttatctcaggaatgccagattggttcatcatctgaaaattaattgatgtaatatattatttaaataaaagacaaaagccgtgatcacctcaatatatgcaaaaaaccaaaagcatttgaaaaaaagccaatacccttgtattctaaaaataatcagaaaattaagaatagaaagaaaaaaataagaatagaaaggaacgtactcaactttatagagggcatctatgaaaaactacaactaacatcatacttaatggtgaaagaattaatgctttccctaagattgggcacaagactgatgtctactctcaccatttctcttcaacattgtactacaggttctagccaaggcaattatgcaattaggtaaataaaagttacccggactggaaaaaaagaagtaaaactatctctatttgtagatgacacgtgtttagtggacaaggtaacaactgaagtgaataaggaatacactaaagtggctatggtgtactctaaaaactattagaaccaatgaatgatttaagcaaagttgcaattgtacaagatcaatgtacaaaaatgaattttatttttatacaaagaataaatggcttaggaataaatttagcagagtaggtgatagatttgtacactgaaaactgtaaagccttgttaaattaagaatgatctaaataaacaaatatacaccatgcttacagattgaaaaacttaatattgttaagatggcagtactctccaagtcgatctgtaaatgcaacacaatccctgtcaaaaatgaagcttgcttttttgcagaaattgaagaactaatcttaaagttcatatggatgcaaaatacacatttttcgtagcagcacatagaatattctccaggatagagaccatatgttaggtcacagaacaagtctcaacaaattttttaaaaatcaaaatcataccacatatcttctcagatcacaatagaataaaacaagaaatcaataagaagagaaacattgaaaaatgtacaaataaatggaaattcaacaacatgctcctaaatgaccattgaagaatgaaatcaatgggtcaatgaagaaaggaataaggacattttaaaaatgtcttgaaacaaatgacaatggaaacgcaacataccaaaacctatgttatacaacaaaagaaatgctaagaggaaagtttgtagcaataaatacctgggtcagaaaaagtacaaagattttaagtaaaacaattaatgatgcacctcaaggaactagaaaagcaagaacaaaccaaacccaaaattagtggaaggaaagaaataaagatcagagcaaaactaagcaaaatagagactgaaaaaacaatacaaaggatcaacaaaatgaaaagttggtttttctgaaaagataaacatgattgataaaccactagttagagtaatcaataagaaggagagatgactaacaaaattagttgagatgactaactaatcaaaattagaaatgaaaagggagacataacaactgataccacagaatgcaaaagattattaaagactattataatcaggtataactaaaaaactggaaagtctagaagaaatagataaatctgtggacacatacagcctaccaagattgaatcaggaagaaattgaaaaccagaacaagccaatataagcaataagacttaatcagtaataaaacatctcccaacaaagaaaagcccaggattggatgtattcactgccaaattctaccaaaattataaagaagaactaactccaattctcctcaaactattcccaaaaattgaaaaggaaagtactgtccttaatgcattctacaaaaccagacaaggacaaaacaacaaaaaagaactacaggccaatattcctgatgaatatagacgtaaaaatccccaacaaaatagtagcaaactgaatccaacagcacatcagaaagataacacaccacaatcaaatgagatttatcccagagatacaaggatagttcaacatatgcaaatccagaagcattatacatcacatcagcagaatgaaggatgaaaaccatatgatcatctcaatagatgcaggaaaagcatttgataaaatccatcatcccttcatgaaaaatccctccacaaactatgcatagaaggaacatacctcgacattaaaaatgccatgtatgacacactcacagctgacaccatactgaatggggaaaagctgaaagcctttcctcgaagaactggaataagacgatgcctacattcaccacttatattgaacagactacagaagtcctagccagagcaatcagacaagagagaaagaaataaaaggcatacaaattagaaaagaggaaatcaaattgtctctctttgtagatgacatgatcttatatttagaaatcctaaaaattgcaccaaaacctcttagatctgataaataaattcagtaaattttcaggataaaaaaatcagtgcacaaaatcagtagcatttctatataccaataatgaagtagctaaaaaaagaactcaaaaggcaattctatttaccatcgctgcaaaaacaataataaaatacttaagaataaatttaactaaggaagtgaattcttccataaggaaaactgcaaaacacttacgaaagaaattgaaggggacacaaacaaatggaaagacattccatgcttatagatcagaagaattaatatcattaaaatgattatattacccaaaacaatctacagattcagtgcaatccctatcaaaatatgaatgtcatttttcacagaattagaaaaaacaatcctaaaattcatatagaatcaatggaggcatcacactaacctgacttcaaaaatatattacaaggctctagtaaccaaaacagcatgatacttgcataaaaacagatactagaccagtggaacaggagaacccagaaataaatcctcctatttacagattttcaccaaaggtgccaaaacaacattgaggaatggacatccttttcagtaaatggtgctgggaaaactggatatctatatgcagaagaatggaactagacccctgtctctcaccatatacaaaaattagctcaagatggattaaagacctaaacataagacccgaaaccataaaactactagaagaaggcatatgggaaacactccaggacattgtctgggcaagaattttatgactacgactcaaaagcacaggcaacaaaaacaaaaattgacaaatgggactctattaaactaaaagcttctgaacagcgaaggaaataatccacagagtgaagagtcagtcctgttaaattggataaaatgtttgcaaactatgggttcgggctcagtggctcacgcctgtaatcccaacactttgggaggctgaggcgggcagatcacctgaggtcaggagtttgagaccagcctgttcaacatggagaaaccccatctctactaaaaatacaaaattagctgggtgtgatggtacatgcctgtaatcctagctacttgggaggccgaagcaggagaattgcttgaactgggaggtagaggttgcggtgagccgagatcgccccattgcactccagcctgggcagcaagagcaaaactctgtctaaaaaaaaaaaaaaaaaagtgcaaactatggacatttctcagaagaagtcataaaaatggtcaagagatacttgaaaaaatgctcagtattactaatcatgagagacatgcaaatcaaaattacaatgagatgtcatcttattccagttaaaatcactattattaaaaagacagaaaatagcagatgctggtaaggatgtggagaaaagggaactcttatacactgttggtggtaatgtaaattagtacaaccaatatggaaaacagtatggatatttctcaaaaaattacaaataaaactgccatgtgatctggcagttccactacatagcatttattcaaaggaaattattatatcagagggacacctgcaccctcatgtttatagcagcacttttcactgtagcaaagatatggaatcaacctaagcattcgtcactggatgactggattaaaaaaatgtgatatatatacacaatgaaatactacttggttataaaaaagaataaaatactgtcaattgcagcaacgtgggtggaactggagggtatttatgttaagtgaaatgagttcagaagataaaggcaaatatttcatggtctcactcatatgtgtataaaaattgatctcatggagtgagagagtagaataagagttaccaaaggctgggaaggatgtttggccatagtggaggatgaagagaagttacttaatgtgtacaaacatacagttagacagaaggaataagttccagtgtttcataacaagagtagggtgactatagttaacaacaaggtattttatatttcaaaataactagaagagaggacttgaaatatttttaccacatagaaatgatagtcaagatgtgagggataccctaaatgccctgacttgatcattacacattctgtgcgtgtaactaaatgccatgtgtcccataaaaatgtataaatgttatattttaatgaaaaacttttttaaaaagtttacatggaaattcataggcaaatcatataacatgtgggacatatgtaaagaatttttataactcattcgttaaaaacataagtaacttaattaaaaactgggcaaaggaattgaacagatatttctccaaagacaatacgcaaacggcaaataaggacatgaaaatatgctcatcattattaatcatcaggcaaatgcaaaccaagttataatgtgataccacttcacacctacaagcaaaaaaaaaagtagataatgagtgaaggtgaggatgtggtgtgtatgaaggactccctcatatattgctagtggggatgtaaattattacagctgctttggaaaacagtttgtcagttcctcaacaagttaaacatagaattactgtatgactcagcaattccacttctaggtgtatatctaagataaatgaaaacatatgtctacacaaaatgaatacctgaatgttcatggcaactttatttataatagccaaaaaataaaaaatggaaataacccaagtattcattgactgataaatgaataaactgtggtatatccatacaatagaatattatttagcaattaaaaggaatgaagtgctgatacatgccccaacatgaatgaaccttgaaaacataaactaagtgaaagaagccagacacaaaggaccacatattttatgattctatttatatgaaatgtccagaataaacaaatatatagagacagaaatgagatcagtggttgcgtagggcttggagaggaataggaggaatgattgctaataggctggaatttccttggggggggatgaaaatgttctgaaatcaggttgtagttatggctgcacaaccttgtgactacactaaaatcatttgagttttacactttaaatgtgtgaattgtatgacatgtgaatcatgtctcagtaaagctgtttataaattgaaattctgagtacagttgatacacaccatgcttttgaaatctgaaaagaggaaagcagacatcaattttccattgcaatttgtaatattgatattgcctgttgtctttagaaaagctggaaataggcagcaaattattgcacttaacacttcaatcatgaattttcctagtgtcaaacagtatacgaataagtggaagttcagtgtatgcaaaaatatgcttacttttttctatatcaaaaagatattatacagaatattccaaatatgtatagttcttggcatcagtggaaacaaaatgttctaagaacatgtttttaaaacaaaatttcttgttttatttgtactaagcttctgtaacataattgttacatggatggctttttttctgtgacatgtacctataagaatggacagtctctctagggtgttcttagaattcattgatatctgagatcatgttatcactacttatcaaattattcattatattccgtttagtgtaagatttacaggaaatgttggttgacaaatatgaggttatgtggtttggcagtcagaaatctgtcagatggttttgtttagattggatttccttttttaaaaaacctgtgttcagagtcttcacattactgaagacttcccagtctttctctttttttgccctttgaagtcacacttgacaatccccctgttttcacagtgttcttccttagcctccgtttttcacattcttcctccttcctccatgatccttccttcccagactcctattctgcttttcttcctctgactttttcttagatgttgatagttctcatggtttcctccttcaattccagtcttttcatttgtcttctttggaaatctcatatgttgccataacttcaaaggcaatccttatacttggtgataaaccacaaatgtccatctttataatttacctctttgctaagtttcatacccaaatttttagctctgtagattagaatttttactggtttctctcaaacatcccaggatcaaaatgtccaaagctcaacttaactgtaaaacatgttcttccattcgtgttccattctttgttaatagcactatgtcatcatccttgtcaatcaaaatagtagtgtaagatatctttctggtgacaaagtccttcctgttgatttttccttcaaattatatcctgaatatatgttcccttcctcatcataaagccttacttcaagttctcaacatttatccctggactattatatcatctgtccacattaaacacaaggactatctttctaaaatattgataggcttatgtaattcttttgtttaaactccttcatagacactattcatcaccttcagaataaaagccacagtccttggcttggcttttcaggatttagcatatgcctaactagctaagcttattgtccatcagtttcccagctgttctagtacactgtgcattcttcaactgtggtgtattttcagacccagttgcccatgctgttttttgttgttgttgttgttgttgtttattagttggaagctaacttcactcgactggccacaaaaattcattcaggactccaggcctatgccaatcagaacattttcctggccagaggcatcattcagaaattagcatgtgacccaattctagaaattaggacaaaagggatgatttgctgggggcttctggaaaaagttttcttcctctcaggagagagcactggaaaagacactctcttccactaggtgtcccagtcaaaggaatagcctaaagctgctgtatccattttgctcccatcagggaaggcagctcaagtcaaaatacagaggaaggcctagttgaacatatctcacagaaactgaacaagacacattggttgaaaccacttctagacttcagatatgacagctattaaatttttgatttatatcagtttaaatcagtttttctgatatttgcagaccaaagctgcaaactgatatagtttcaaaaaagatcaaggagagatgggtggcagtatattcagtgtgcagaacatggatgaaaccaattcccattgttaagactctgctttttcccatgagcagacttgtcacctttaggcacacttgtttatacatagataatatatgctttatatttgtggatataatacttccaaatctgattatgacatacagtattgaagaactaatattcaaaagagctaaatgcatgtatccttctgaacataaatgctaatgctaaatttaaattgatggataaacattgtgatacagacaggaggcagggaaatactaggtcgaagacggggtgggggtccctggcgagggctccaccctcaagcctggacctgcgaccctaaatgagatcatgaattcctgctttcctgcccgaatgttgccttttccaaaaccaccctggcccaccatatcccctaccctgtacctataaaaaccccaagctccactggcaaaggagcagagcaccatggcaaggaaggagagaagaagcatctgaatgtcgagaggagaagaggcagctggacatcagagactacggttggagaggagttcagctggggacggtcagagaggagttccgctagggatgaccaaactccaggggaagataatcttcccactccgtccgctttccacctccccatcccactgaaagccacttccatcgctcaataaaatcctctgcatacaccatccttcaattcattcacgtgacctgattctccctggacaccagacaagaatttgaaaacactgggcatgagctttttaacatttaagccatctgcaaatggcaaagctaaaaaagcattgtttgtaacacacaccttctggggctccacaggtcaccggcaacacctagacactgccgtgggctggtacagggtttgttcctgccggcatccggaaacactcatcctggctcctgcacctgctcacctgtgtgctcccctccagcaaagggtttgagcatggcagccaagtaaacaagccacccctgtctcaagtcctgtgaggggctcgagggaactctcccatctcaattgggcaacactgtattaaaatgcaggggttttggtcagtattttggggttttgttgttgttgttttaaaaaagcaccttatttttaaatttttaaaatatggtagatgtctagcccaaaaatgaattaaaagcatttctattttttatacaaaacctgagagccttttatgtataattattttgaagctaaccttttagggttcctactcaactgtaaggagaattgtgaaacacataggttttttttgcacaataaaattgttaacagaaaaaccacaaatttaatgtcactccacatgtccttctatgtcccagatttattttatccaaaaaaagaaaatgtcaaacatcttttaattttctgttctttttattgtcaggaagagttttaagactagggcatagggaagttgtttattatgaaacgaaatgcctagaaataaaagccaatgtttaaatgaaaaagttgagtctcttaatgtttaatattttgcataaatcctgggcttcataagcaccttgataattcatataattttagatgttaagagagtgagaaggcaagttttagttcttcacttttttaatgcttgctttaccttgtatccttcttttctttcttttctttttctcttccttatccagaggtgataagtttctgtggtaattaaagtacagctgtttagtttcatctctcttttgaatccatgctcagttgtattaagatgcactgcactaagatagcaacacaggatgcaacaggacctaattttgcacacgtggttttattttgttggattaagtctgatggcagctctttgaccacattttgtatttactcctcatgtagtcaattcatgttagaattctgatctctcttgggaaattggtagatttttgatttgtacctctgtgccttcagtggctaagtgttaagcctcaaatgaagatattatttcatagaatgtctgaatctggtaactttttttataagaacatgccaagaagacacacagcgtatagttatttcatgataaagcttgtaggcaagagtgacttgccagaataaatggaaaaaaataatgaatagaccaataaaaggatgtaagaaaggcattggcaacctttttctttttaagcgtggggttaaacatattttgtgtgtttataataggaatataattatttttccttttttattggacattttaaaagaataaatgcaactgaaaagagaaaaactaaaagtcagcttattttgacttttcagtaattatctgtatgtatggcttttattgttgtttcttctagttactggcttttgctacctctgttcattaaaaaagacagccacctcccaggaatttgggtggatttttctcacaatgactcatttcctttttaaatgtattagcaattagctcccagttatccctaattgcagctttgttagacttcccacctctctctgcttactgaactagaagagaagtacattaaaagtttatataaatgactgggttttctgctttaaggaaaattttaaagaaagcagacttttcattaatgggaaaggaaatagactatttccagcattgagtatgctgaatggataaatgtagggaggtacaataggaaaactggacacttcccaaagcctcccaagtttttgccctttaccatgtttctgtattattttagattgaagttgttcccagaatgtcaaatactcccatattcaaatgtaagtacaaaaacatatcctgaagccaagtttaaaaaaaagttatttgccactcttcattgcttcaaatagtgtgaaaattagttatacattttcaaatacagttattctatattttaaaatgtaatccatgtatgtgtttttttaaaggctctagtaggataattccctagttgatgtagaatggaaactaaaacattgacatctttacttatttccaatttaaattgcatttttaaaaaagggtatagagttctgctttagttggccttgttttaactgccatgggagtttactttcatctcagttcccatagatatgtgtgagaaattctttggggcctgaaacaagagtatcttcagggttatatgatctgacctaatcaaccatgaatgctctcatactcttaaaaaaaaaatctcttttaaaagctatttaatgaaggcctttctcaatcatcttctccttcttcccttgattagacattgatgagtgcagcatcattcctgggatatgtgaaactggtgaatgttccaacaccgtgggaagctatttttgtgtttgtccacgtggatatgtaacctcaacagatggctctcgatgcatcggtaagcctcgcattttgaaggctcaatacactgggtctttataatgacaaaacagcccaaacaggtatgaagatggcaacgattataaaatattgaagaaatggctgaatgagttgtttaatgtaaacggtaccagtattgagggattgatagaccaggtactctttgcaaagacttcagtttcagaatccaactgggtttgttttatgttgtcaaagtcattttgggaataaagaaagacacaaaggcacgagaaaaattttttaaaatctgctttgggagacagaatgtagtaattaaagcttcttttgtgctatgaatcatgaatgttattaacatcttatttacttagaacttgtttattctattgaaaatagttactatacaaaaaagacacctttaattttgtgtttaaatatattcaaattaaaaccattgtatgctctcccttgtttatttagaaagatgcaatagtgctacagtcatggtgaaggtaatctgttattgagcaaggcttagacatctgtcttattgcgagcatagagattatgaagtgtcttttgatgcataatcacagcacagtgagctaccctcacatttcccttcctgagcttttaacctagtctattccaattttaagctgacaataggtaaaaagagaggaaaaaagaggcactgttatctttactggcactaaagattcatgtagtgcaggaattaggaaaattaatccaatacttaaagaatggtgttgtttggtccactagagggtggccgtttgggcagtgtctctctctccccaaaccaggcagttagtatgtcagcaaccaactgccaggatctctgtaggtcttgatgattccctgatgattctcatgtgcccaagagaactgagttgatgagatggaaatacagagtcaaggatgtaagctagaagtcgtaggccaccaataaaaggactgtggcctgaattcatttgattaaatgtactgatatatcaggtcatccagcagtgaacataagagatacaaatcctgccttcagaatgccatattgtcatcataaataacagtagaagcctactaatagcagtaatagaagaaacagtagtagtagtaaaaataatagctgtcatttaagatattacacataccgtgtgtaaggcactgggcttctccactacctcattatctcatagctgtgaggagtcaggcaagctaccatcttctctacacttcagtttcttctaataagtgtccaataaaatattcttcattattattcttattaagaggaggaggaggatatgcctgctctggacctatataaatatgtcatatggtccttctaatagccctgtgtgataagtatagttattccaaatttacaaataaaagaaatatggtttagagaggttaagtgacttgcccagtgttttgcagccaatgaatggagccaggattcaaatcctgacctctctgactccagcctcttgtgctactgtgacactgaactaccatttacccactttaaggctgtggagatcctgtggctagatgtcagggcctccagcatgactgatttcttcactgtcatgctaacagcctgctttgagaagtaagatgtctgttgggagcctcatgtcgtgtctttgaatgagaattgtttgtgttttacagatgaatcagagtttctatcttgcattaggtaaatcatttttcgtgaaatattaagtctgtataactgagcagataaactattttagggttactgttgccagttggctcactgtgtagtaagtttgattcatttaatactctaattcccccttatccacggtttcactttccatggttttgttttctgcagttcccactgtgattcaaaaatattagatggaacattccagaaataaacaattcataaattttaaattgtacatcattctgagtagcacagtgaactttcacaccagcccgtccagggtatgactcctctttttcccagcatatccatgctgtataggctccgcacccactagtcacttagtagccatctcagttatcagaccaactgacagtatcgcagtgcttatgtgcaagtgaccttattatacttcatcatggcccctgaacccaagagtattgatgctagcaattcagatatatataaaatgagaagccataaagtacttcttttaagtgaacaggtggaagttctctacttagcaaggaaaggaaagaaatcgtatgctgaggttgctaagatctatggtaagaacaagtctatccatgaaattgtgaatgaagaaaaagaatttcatgttagttttgttattgcacctcacactgcaaaagttacagccacaatgtgtgataagtgtagttaagatggaaaaggaattaaatttgtgggtggaagatatgaacagaaacgtgttcaaattgaaagcagttggattcagctccattcaaggtttcaggcatccactggagatcttaaaacgtatcccccgcagataagggagaactactttataatttggctgtcagctttctatgagagttgaaaattagtgcaactacctacatctggcttgattttcttgaactctataggaaaataatatgtttatgcacacgtgcatatgcgaacacaaaataatcagcttggaataggtatagattcaactctttaggagaaacgtcgccgtgggagtcgtcattgaacactgttgtctgggtgctgtagaacctggcttccggaaacttgtctcctagaatattgctagaagaaatatgcctggagaaggaagtgaggttattattgtgaagttctggaaataccaaatacagcacatgtattttatttggtaatcaatgtggagtaattgaaggcttttgagaacaaattgtaatgcagggttgggggcttgagaatagagagaaatgaaactagttatgaggtagaattgccaaaacaagtttcagcgttttattccccatttctaaattacttctttttatttactcacttacatttcaaaatctttctctagtcaaacaaaacttgcattcatatttttgttctgcattggaaaagaagcatgaatcctcattttattcagataagaccaacgtacctaatgatttactaaggtgggttttcttagaggagagttttgatttaccaaaaaattatgataaactctttttatctcttgcctccttatgttataaagtcctaagtctctacctgaacattcaaagccttacctaacctgtattcctgagtcatctctaaccacttgccacctcacacttgtatttccctcattgttgtacaagaccacactgccatgcctttgccagcagtaccccctctgcccgaagcatcttgtttttccccttctatgctcattaaaatccagctcaccctttaagtcccaaaataggtatcacttttccttttttgttttttaaagatggagtctagctgtgtcacccaggctggaatgcagtgtcacccaggttggaatgcagtggcaccatctcagcttgctgcaacctctgcctccttggttcaagcaattgtcccacctcagcctcctgagtaactgggattacaggcacccaccactacgctggctaatgtttgtatttttagtagagacagggttttcctgtgtgggccaggctggtctcgaactcctgacctcaggtaatccacccgccttgacctcccaaagtgctggaattaaaggcatgagccatgacctctggccagtatcgcttttctttgtagccgtttcacctaaactacattttcttcttgggcaaaattaatcagccccaccattttgaaatgaaatgaaatatgttttcatttgcttcattttagggtttactgcattgtcacaggtacttctgcgttactcactggctagactgtgggctttgttaggccctgtcttatgcagcttcatggaccctgggctttatgtaataggcatcttgcatagaagtttgtgctgagtaaatcttttctgaatgaacaggaaaaccagcaaatgaatgaatgagatgatattgaatgtaagaacttcatgttgattatagcggccttgcagcctttggcatctctttggacatgatgtcgtgccactgaattacggtcctggatgctcataaagcaagagctaacttgaggttcggaaagctaagtcctgcactaaccaggagtcccattcatttcactatcaacatcctgaacactaggaacaaaggaaggtctctagggaagggagaatggctctccagaattacaaaaccagtgttataattaagtaagcagcttaaaaatgttttgaataactatgttacatttggaataagtatgtgttttccatacatgagaaaaaattaatctaacatattaatgtgtacgagatctttgatttctaaaattctgagtctgtattttctcagattgaatttatttggttgaattatatatgttggagatatttgcacgctatttattttctaaccacatgtatgctaataaagagttggatgaacttaaagctctttttaatactaaactgcgtgttatctgcagctttattctgagagctcacatgtgctgaaagtgacatttgctgaattttgtcttaatttcttattctagttaacacagatattctgagtgtataccacatgacaaagcatcagtaaacttgatcctatttcttttgtgtgctggaaaacagtttcacatggtaggagagtttaaccaggcaatttaattataagacacgataattttccgctttcattgtatactaaatataaaagtcaaatttctgatttgtttatctatctagtgtgtttaatcatctttttatatatccaggaaagaactgttttttagcatagagcactaacatgtgccagttccaaaaaaaaaaggagttaaaacgtacctaataatatttctctaaaaagcgttttaaatagcactacttaataagccttaagtcattttggaagtaactgtcatggtcatgtccaaggaatgattaatacctaatttgcacattgttatataggcacagaagaatggctggcagccagcaataaataacgcgttggcaaagagcagtgagcaacttctgtgtgcaggataatgtgtctgctgctattgtgtacacagggtgagaaaggaccctaagcacagggacccaaaagggccagttaagttcagaaaatgggattaagcatttagaaattcttccagtaatatgatggtgccacagcatgctaaggcatttcctcaagctttccaaacgtgttagtgcacaatactgctgtggagtattcttgaaaaaacaaaacctgaaaacataatgtgaaaaaatataataccaatataaaagaaagtttgaggcagaagtgatgaccagtatatgggttttttttttcctttttcaagaaaagggcaaggtacagaattatttatgtattacacagcactctatgtaacgctggctgttgattccacatgcatgtgtgcatttgaaacaaaacacttggagaacccaaaattatttaactaaagagggaaccagaaatgaaagagtatgaggatatcagttttaattaagaaaggaagaagtgtgttagaaggagaagttttccttacagtgaggaagaagcccgtcattcactattttaaaggaagaaataaacctgggatccacagtggttccttttcattgctcctagttctatagttactcttaaacaatgtaaacatgaaagtattttaggaatagtaagaatccgcaaaatcaatcaaggggagcccaggctggaaccagaccatcaaagaggtgagtgcaggcatccagtctcaggagacaagcatgagacaatggctgctatttaccgaacacctactgtctatcactattgttctgacctgggctaatctcattggtgttttctggctgaacccttcatttcttaatgagcaaacctaattccacaggagacatttatttcaacatacaatccccaatttttgccaagttttcatcacattgtataattaaccattagttctcttaaatcaagtttacacaaaatgtcaagctatgaaacaaactctgataagtgtacctttattacgtttcaaaatagatttatattttaatcagaggagatgaattacttcctgtttctcggtgtgactgtaaatatgactccttgtaagccttgttcaggaaatgtagtaagggcgatagaaaatgattagaggaatagacttgttttcattacttaggacacattggttctacagttaaacatatagcaagcattagagggattttgtttttacaggctttcatctggctttgcccctaatgattccctgtttcaaggaatagtgtgcctggacaactcttgtttctaacaggtgcctcttttttatttcaaatatttttccacatgatacattttttaatacagtgctttctaagggccatgaaatttcatacaaaggaaagagaggtaattcccagcctctgatttgctttgaaatatgcctttttggagaccttaactgtgagatgctacaccagtgtatgtctcatcctggtaggttttggctcaagaaatgagaagtaggttgcctgcctcctttttgttactagaaaaagctaattgtagaatttatgaaaaaagttacaatttactttgcagtcctctgttgctgcctctctaccctctcacctatgacttagtttccttcagtacatgtattacaggactgaccagaggtttccaaactgtgtagaacaatggttattattagtattattttttctttgagacggaatcttgctttgtcaccaggctggagtgcagtggcgtgatatcggctcactgcaagctccacctcccgggttcaagtgattaccctgcctcagccttccaagtagctgggactacagcaacgtgccaccacgctgggctaattttttgtattttagtagagatggggtttcaccatgttggccaggatggtctctatctcctgaccttgtgatccacccacctcggcctcccaaagtgctgggattacaggtgtgagccactgtgcccagccagctattaatttttttaatttaaagacctctctttaacataaaaaatgtacttcagatcctcacattatgataatttaatattcgtgagagcatacataatgaaaatgttcttggatatttagtaataatgataaatgaatttggattttattagctatagtggcatattcataaatgtgaatcatggtagtgccaataaactgttaagtgttacattgcagtgttcaatgaaaatatgcatttgtgaacccctctcaatatcattgcatactcccaaagtctggggattggtatagaatggattcctgataagtacttgcaacattttgattgacatttatattagtctgttttctcactgctgagaaagacataccagagacttggaagaaaaagaggtttaattggacttacagttccacatggctgggaaggcctcagaatcagggcaggaggtgaaaggcacttcttacatggcagcagcaggagaaaatgaggaagaagcaaaagcagaaaccaccgataaacccatcagatcttgtgagacttagtcactaccatgagaatagcatgggaaagaccggcccccattattcagttacctccctctgggtccctcccaccacatgtgggaattctgggagatacaattcaagttgagatttgggtggggacacaaccaaaccatatcagcatttttatacatattaccttatgtataaaatgtgttactgtatttggtccatgaattgtttagaagtataggatgttttcttgtttattttgttattgatttccaacttcatttcatacattgtggtccaagaatattaccagttgataccaattcttggaaatattctggtacagtatttgcttcatggtttaacaaatgatttatttttataaatcttccctatggacttgaaaaagatgggtgttctccaattgatgggtgccagattgtagatatatccattagatcaaacaactgtactattcaaattttctttgtacctacagaattttgtctactatatctattactgaaaaagtcatgtaaatattccactgtggaggtagatttctcagtttctccatgtagtctagtaattttttattttatatagtttgatcttatgctataagtgataaatgtttaaaagtatctgccatattttcctggtgaattgaaccgttttaaaattatgtattgactctatttttttttctttatttgtggtctatttctaaatattttcttttggtttattttgtatcacaaaatatcttagtatactctggtttgttttgtatcacaaaataaaccaaaaaataaagcttctggtagcagaagctttaagtatatacctactatgtattttccctctcaatctttcctcttccttatgttttaaatgcatttcttttaaacagcctatatctattttttgttttatttttacagtctgtaaatctttgtctcttcagttgagatttaaatccatgtgtatttattatattactgatatatttgtttttatttttaccatagtccttgtgcttcctacttatcttactttttttgtatttttttctcctttcttggtttcttttagatttgttcaggatccccccgacctgctgccgtgaactcgattctctttctcctatttgttaagaagttatgtactttatttctgttgcttcagtggctatcctagctgttttaagatgcatatttaaaattacctgtatgtttgcctatatataaataataaaagaatatttaagtggttaaactttgatcttcccctcacaactttttaaaatctagtatattgccattcctatgtgtgacaacttaatcattattgtttaatatgttagtacttatttagatttacccacttatttaatattttttgctcatcatttcttcctgcatctcaaaccttccattgggatctttttcttttgcctgaagtgcctctttcaacattttgtttatcaaaaaaactcttggtagaaaactctggttttgttttcttgaaaattaccttaatttgccctctgcaaacatgatttatcacagtacagaattttaagttgacagttattttatcagagtatactaagatattatttcattgtgttctggcatccattggtgctgccaaaaagtcagcaatttatttttttaaaataccgtttctcagcaggtgatctgtcttgtttttccacctatttttaagatctttacctttgtagttctgcagtttcacagtggtatggctaattgtgtatctctgtttatttttcctactttgaatgtattggacttcttatatctgaggtcttacaacattgctagaaagttctaagttagtatccattaaatactgcttctttcccattctgcttattactcttcctagtactcttattacatgttgtattagtctgttttcatgctgctgataaagacatacccgagactgggcaatttacagaagacagagatttattggacttacagttccatatggctggggaggcctcacattcatggtgcaaggtgaaaggcacgactcacgtggtggcagaccagagaagagcttgtgcagggaaactcctgtttttaaaactatcagatctcttgagacttattcactatcacaagaacagcacaggaaagtcctgcccccgtgattcagttacctcccaccaggtccctcccacaacatgtgggaattcacgatgagatttgggtggggacacagccaaaccatatcagatgtacacaggtgtacatctaattagcttttcattctcaccttcatatttcttaacctctttttaacgtttcagtgtctttgtctctatgtgctaattgaagataatatattcatatatatctgccaactcagtaattttctttatccatgtgcaatacacttgtgtaatgtatttgtcagatactttatttcatttcatttatagaagtttgatctcttttaagtctgttcctattcattgtttatgggccttttccccttgttcatgtcttcagacttgaattgctttaaatatattaaatataatttagttattaattaatatttaattattaataatttaaaataataattgtcagaattgatctgaccatttcaatatcaaaaatatactggttacttaactagtttttgttccttagtgtgttattaatgtattttcctgttagcagctcttttttctaggaactttatgagaattttttgagactttcattaatattaggtcctctaattgtgttggctcttgtgagttgcttggagtgtctctaacctgagaacctctttacgttatattcttcctttgaagttcttcagaccaaaaacctactatgaattgaggcatcaaagctattgatgtgaggaagaccttgtggttacagattcttaagagagatcttttttttttcctccacagagcatcaaggtagagacaggcaagtttcttagttgcctccattaccttatccatatactatatccataaactaagcatatggctctttggaaccctaccttacgagggagttttctgttatgtattgggggagagtggaatctgggctttttatgtcttatgccccgggcactgtgaaactatcagagttgaaattcacagtctccggagtttaatagtagcctaaaggtgaaattagttgttcaaatacctcctaagattctcatttcacctcatttagggactctgttttatccttcatttcatgcgagctggatgatgtgtttttaaatattttttcacattttatccaggatattttaattgagaggaacattcagggtagctaattcaccatgaaagctgcaagaaatagagcatatgttgttttatttcattctcccaccaaccatgttctgtacagaagaagagttaaatacggttgaaaatcgaacaattaataatatttgaatgtaaaactaggtctcttgactcaaggctatggttttgttttttgttgtttcgttttcaaattctatattacaacctccttcttgtagaagccttgaagagataaatatattcatcctaacttgtagcactgattgtgttttataacgttagtgattattgttaagagtttggaactttcttattttaatttacatcctggccttgaggaggtagtatatgatacttcgggttcataaaatgaatattccaaaaattgtttcctgtgattattcttaggaatagaaacttagttgtgaaattattcctaatgacagcctgtccaaatccaactcaagtttttgaaatttctgcagtgcctttaattatgtgtgcatacatcacatttagtgctcggttttgggtcttactgggattttggggagaaatagaaggagttgttcgattcttatacagagtatcttaaaggtaattcatttattttatgatagcttaaaagcaatctgaggcatgctatatatgggccattagaggacataatgtgcttactttaaactctgtatccagtgctaaaaattttaactttacctgttaatggaattataagcaattaacagtttcatcttcattattgatatgcagatcctgattgctgtggtacatctttcttcttgtgatcatagacaaaacaactttgaaagcatcttgatagggttgaataatatgttgttaatgaagctcacagttttttccattggttactataaaggcagtttcagttataacccataaagtttacagatgatattgataatttatccctatgcaactttgcattttatgcagtcttttgcaatcatcataacctgtcttctagcctttatctgatcattttgatccattgtgtattctgctatcagattgacctctattacagtcatatttgatcatgtcacttccttacatcaaatcctactggataatgcacagactctttaccatagcactcctgccaaactgtgcttacctctgagtggtcaccttattttgcctctcaatatctagtttggcacagtcagttttccctagttcttgaaactgtctcatctggctctggcttagaatgacatatatacactgacaattcacagatatatatgttcagcctgactatgcttctgcattccaggctcatttattcaacattccaaatataacatgttttaaagaggagccttgtcttgtgttctctaatcccgtttcttccctcgccatccccatctcagctgtgtaagtcaaaaacttaggaaatgtctaagactctctttcttccataccccacacccaagcaagttcccattggctgtaccttcaaaacatgtctgccctctgctcagcctcatcatctccactgctgccaccctcatcaaagccaccatcatctctcacctgaatgtcttcagtgtcctcctcactggtctctgtgctctggctacagtcagttctcatcgcagccaaagagatcttcttaaaaatgtaaaccattgtcttctctcattgtaaccatccaggaaatctccaaaccctccactcgaaatccaagtgaaatcccaaggtcctttcctaatggcctataggaccatccatgatagcctctgctgtctctctgagctcatgctcctgcactttcccttccacatgctgttctctagtcatagtggcccatctttcttcacacacatgaagcacattctcttcttcctcagaagctgctctttcctcagatacttccatggctcatgccctcattttagtcagctgccttctcaaatgtcactgtttcaggttgcatctgatcaacttttataaaatcatcagtcagatgttgctgcattacagacaaccacaaaatcacagtgacatacaacagtgcgcatctccaggctgaggattgggactgggttgttgctttccttcaagcttcagaattgcctgactttagcttcttactgcagtctgtcctcctatctgctccacgtctttcattgttctgtccctggctcaatgaatgtctgagatattaagagagtgaagaaaggaatagataacagagattaagtggtatgagtcacttcacctacattcatctcatgtacagtgattgttgtaagaacctgaggtaattctgccatatcttctgtcttatttatacatgcacagatcagagaacaggcatgtgtttctcgggcctggtgaatggccgctgtgcacaagagctcccggggagaatgacgaaaatgcagtgctgctgtgagcctggccgctgctggggcatcggaaccattcctgaagcctgtcctgtcagaggttctggtacgtggctggctgttagtctcctcagcacagacactgttaggaaaattagtagcagtactgtattttgctctctgggagaccaaggcaggtggattgcttgagtccagaagttcaaaaccagcctgggcaacatggcgaaatcctgtctctacaaaaaatacaaaaattagccgggcatggtggtgcatgcctgtaatcccagatacttgtgggactgaggtgggagaatcacatgagcttgggctgtcgaggctacagccatccatgatcatgccactgcactccagcctgagtgacagagcgagaccctgtctcaaaaatatatgtatatattttgctcctgtccttgaagtcaagtcatatttgttttcctttgtgtgttttcagtatgacttgagtgtttttgtggggagtgtgatagcattgttatttaggatcagttttgataatatctaatttagtaacatcagacaaatacctgaaagctgtttgacttgtttttgtgcaagtgttgttttttaaattattttgaatgttagtatttcaattcagtttttaaacctcctgatctttcatccagagctcaaatatctatgaggaagaaaactctgtcttcatttatactttatttcaggaataccttcagcttataatgtctcagtccttgaagatatttcctctcttctcatgatcttgaaaattaatcatacaagagtatgatgatggctctcattaactacgctgtggtaactgccatataaatgatgctatattgggaaattagggttaatgagaagtagttcctcttgttacgtgtaatatgagtagtaaagtacaaattaatgtttctcacataaagatatattaatatattcaattctattatcattttctcattgaattaaaagcgtgtaaaataattaaagttttcaaatatacttacaaatatttatgccaatatgtactgttaacagaaaagatatcatgacacattaatcattcttacaaaatctctaagtcataaaataccaaaatctattagtaagacaaaaaggggcagaattaatgcctagtaaataattttggattctcccagttccactagtagtatataattaataattttttttccttctgatacagtgccttaagtctgcaaacagttaaggcaataaggcaattgctatcttcttgcttctctttactcaactttgtcacctggacaaaaaggagcagattttaaagcttacttgatattgtctaccgttaaaatccaagttagaaaaaaatatcattctggagcaatattaatacctaatctcctgaaaaaaaatggacaggaaaaatgtataggtataatgctgaagagaatgtaagtaaaaccatacagatagaatgaattagcataaagctttaacttttatctgtacaagtaaattttctgtatttataattatgtctggaattttatgagttgcacttaggtgcataaaataaaaatacacatgtaaatgattgtttatgcaactcagttaaaataatgtgacaatataggttttaaattttttctaaaacttctatatctttttcttgctactgccagcattaaaaacatgtattgagatagtaacctacttaatcatattgtgtagtataggtaacccaaagtgacttagtacagtgtaccaatggcttttgttatgcagaaagacattcacctgtgcttaatgccaactttcttttcttctagaggaatatcgcagactttgcatggatggacttccaatgggaggaattccagggagtgctggttccagacctggaggcactgggggaaatggctttgccccaagtggcaatggcaatggctatggcccaggagggacaggcttcatccccatccctggaggcaatggcttttctcctggcgttgggggagccggtgtgggggccgggggacagggacctatcatcactggactaagtaagtggtcagttttcctgtggactctttagtttcctgcctcaagtgacattataatatctaacataattttaatttttcaaaagggttgtatgaacacacttgcacatgtgtgtgtgtgtttgtgggtgcgagagagagagagacagagggaaaagtgtttcaaggtctgatacatagtaatactaaatttgggaaaatgtaataggaaaatattacttttatgttctgtaaactttctgttaaattagagaaaagaatgtgtgacccaggtcttcgcaaatacatatgagagcccagtaatactccaatccagttgacaccaccaaaaagcatgtttttggtttcaatgtatttcatttggctgtttaaagctgccctgttcatgcaccccttgaattattttccagaaccatttctccactgagataaactgaatatcttgctctgtgcagatccaaatattgtaacgtacatatctttcctttcctcacccttttttgttaaattgcttaagaaattgaaaaccgtgggcttcagaccagagttggcatttgtgtgcttgacatttaacttcattctttttaaaagccctctcttgctaataatatttaaagatgtcctacagtgttatgtttattctttttggcatattgccgatttactatatctgaatattcagcagagttacaaaggagaaacggaaagcactcaaacgtatggtagaacattcctgtaattttaaaaagacatgattaagggcagcattttcagatctgtaacttaacagatacaagttgcaaccatgtgtctcagtaatattttttagattctccacattaaagttttaataaaatataaaatatgagcttctgatatacatctaattaatttactattaaatgtcctttaaaaatcaattcagaaaagtaatgcatgttgtaatgattaaatataattgtgctttaattttccgtagcaattctgaaccagacaatagatatctgtaagcatcatgctaacctttgtttaaatggacgctgtataccaactgtctcaagctaccgatgtgaatgcaacatgggttataagcaggatgcaaatggagattgtataggtaagtttgtgattctttaataatccttcttagtttttttagtagctattagattacaggatcaaattggaatgaatatgatttttttaagtcttttgaaatacagctaatttccaaactgtctcttctgtgtgtatgctattcagtgtgcccccttaacctatgctgagctagatcactttaagaatttcctaccctttcaagtcctaaatattgtgatttctgtctctgactctccctttccattctccttagaaatgcttactcttaatataaactaaaaataaaaaggaatctatgtaacaatgaatatattttaaaaacaattcgtcaagcatgaatccatctttaaaagatgacaagacaccaatggactaaaatctgatatgtcagggcagtagttttcaaatatgtcggtctcagactcatttcaactcttaaaatcattggttatctctactttgataattacctaattagaaattaaagatgaaaatattaagacatttattgatttattcaaaaataacaacaatgaatccattgcatgttgacataagtaacatttttatgaaaaactacatttttgaaaacaatgtgtggaaacaagtgtcgttgttttacatttttgcaaacctttttaatgtctgccttaatagaagccagctggattctcatagctgcttctctatttaaggtttggtgatgttttgttttgttttgttctgttttgttgaggaatgaaaatctatcctcaagcagatacatagatggaaaagaagaggaatattgcatagactttcagataattgaggttattctttgatattccaccaaaacttacaaggagtaattcttaaagtttagttaaccatgtagaatctgaaaccatattagtacactttttgtactctgttacataaagtccattggtttgtctaatgctttgagtggattttgtaacatgcattggtcatttgaaatatattgatgcactgtattatgcacatctttccaaagttgaaatattttactatgtactatcaaaaaatcatatttgagaatatcaccatcaaactcataaaaatgccttcaaattgctgagaaacaatcaagcatacagtgttaaataatctttctgaattctgtcatttttaagcttgaatgttaacattagcatcaaatatacagtctgttccttttcttaaagtgacaggctcactgcattattttcaagaaaatgtctgccagattaataactctgaataactataatttgtcagtcattcttcaagtaaaaatagtattctgcagaaaaagctgctaatggagtgcacaactcaaaacaactacgcagaaacttttccttgagacaggcactcgtggtgcttcagtcagcaacaatgtgtaatgtacattttgtcacagaagtattttaaaaatgtatattcaagggccaagattattattaattttgtggcttcaccaattatattcttaagtgaaaatgtctttttcaaataccctgtgagttcattgtattgactggtaggacagtttggtgccattgccttaacctgtgctaagcaactatcattgctcttgtgccatcagagaaaatgttaacatgattaaaaaaaaaaagtaaatagcatcttaatatgattgtgaaaatagttttgaatcaaactcactctgaaaggatctcaatggtctcccagaggccacaccttgagaacagctgctataaagagtccccaactttcttgtaggtcatatacaaaaagtttaacagtgagagagttagtagtggtagacttgaaagttttcattccttaaatgccatttaaattgatttgtgctcagtaactgtgatctgtatgctagcaacgtggtgaaagaagagaccatcaggaatatccaatctagcagcaggatctgcagtagttaggggttacattagtgtctgtgaaggataagggatttccgcatggagttaaaaaaaaaactccatagagaaaggccaagatggctcagtagacacagccaggaagagcatttcctactgaaagatcagaccatcaagaagactggcacactctgagaggatcttcagaaggaaggcattaagaatgtatggaaggagcacacagaccctggactgaagtaggaggaagctgggaagccttcatggggctgccaagtgccaggacttgttcctgaccctgagaagtgaattaaatagttgaggagtggcccactctttgcaggggtctctggaatcctacctgcagaagatcttacaacctccatggacatttgagacatgggagagctgcttggatagggggcagggacaggactccagcctgtgcagagcccagagggtttggcaccagagtggctacgatgcccataccccagggcttgacatcctcctttagggggctttggccttggttgactgttggacctggacagagcagagcagtcttgcccatgggacaaggccagtctgatctgagtgtcccccatctgccggcctctgccagtgtccctgcatggctgtgtccacttggagcacagcctcagatgcccatctggggctcttcccaggtgtcaccaccatagctcctttgccagcaaaccctgcctaaccattggagaacttcagcagatgggcctctgccagcattctcccacctgcagcctctccccacaactttgctggcatgcacttgcccacagccttcccccattgctctgctggcacacatgcacataggcctcatcaccccatcaccactggcatgttcttaagaagcaaactgatctgatagagctgaaaaactcactacaagaatttcataatacaatcagaaatattaacagcaaaatagttcaaggtgaggaaagaatctcagagctcaaagactgttctttaaatcaactcagtcagatgaaaataaaaaataattagaaagattgaacaaaacccctgagaaatatgagattatgtgaagaaaccaaacttacaactcattggcatccctgaaacagaggtagaaagagcaagcaacttggaaaacatatttgaagatattgcccacgaaaaattatccaaccttgctagagaaggcaatattcaaattcaggaagtctggagtacccctgtgaaatactgtacaagatgacaaacttcaagacatacaatcatcagattctccaaggttaacaagaaataaaaaaattttaaaggcaactaaagagaaggagcaggtcacctacaaaaggaaccccatcaggataacagtggacctttcagcaggaaccctacaagccagaagagtttgggtgcctatattcagcattcttaaagaaaagaaatcccaaccaagaattttatattcagccaaacaagcttcatacgtgaaggggaaataaaatatttttcagacaagcaaatgctgaaggaatttgccaccagacctgccttaccaagaggtccttgagggagtgttaaacatagaaatgaaagactgttaccagccaccacaaaaacaaacttaagtacatagaccattgacactgtaaagcaactacacaattaaatctgtataacaacctcctaaatgcaatggcaggatcaaatcagcacataccaatattatccttgaaaatgaacgggctaaatgccccactgaaaaggcacagggtggcaagatagataaagaaataagattcaactatatgctgtcttcaagagacccatctcacatgcagtgacatccatagactcaaagtaaatggatagataaaaagctaccaagcaaatggaaaacaaaaacagtgggagttgctattctaatttaagacaaaacagactttaaaccaacaatgatcaaaaaagacaaagaaggccattacataataataaaggttcagtgcaacaaaagatttccctatcctaaacatacatgcacccaacactggagcatccagattcataaaacaagtttttagagacctacaaagagttgtagataacaacacaataatagtgagaggctttaacaccccactgacagtattagacagatcatcaaggcaggaaactaacaaagatattcaagacttaaattcaacacttggccaaatggactcaacagatatctacagaacagtccacccaacaacaacaaaatatacattcttctcatctgtaacatagcacatactctagattaaccacacacttggcaataaacaattcttagtatattcaagaaaaatgaaattataccaaccacactctcagaccacagcataataaaattttaataactaataaaagcaaagatacaacataacagaatctgtaggacacagctaaagcagtgttaagagtaaagtttatagcactaaaatcccacatcaaaaagttagaaaggtctcaaattaacaacatcacacctggaggaactaaaaaaataagagcaaaccaaccccaaagctaacagaagaaaagaaataaccaaattcagagctgaaccgaatgaagttgagatgtgaaaaaacattcaaaacatcaacgaaacctaaagttgggtctttgagagaatacataagattgatagcctgctatctagactaataaagaataaaagagagaagacggaaataaacacaaactgaaatgataaaggagacattaccaacaaccccaaagaaatacagaaatcctgagacacctctatgcacacaaactagaaaaccttaaaaatacctctgtgcacacaaactagaaaacttagaagaaatcataaattcctggaaacataacatctcccaagattgagccaggaagaaattgaatccctgaacagaccaaaaatgagttctgaaattgaatctgtaatgaaaagcctaccaaccagaaaaagcatgggaccagaaggattcacagacaaattccgccagatgtataaagaagagctggtttcattcctattgaaactattccaaaaatttgaagaggaggaactccttcctaactcattctatgaagcctgaattattcttataccaacacctggcagagatacaataaaaaaggagaaaactttaggccaatatccttgacgaacatagatgtaaaagtcctcaacaaaatgctagaaaactgaatccagcagcacatcaaaaagctaattcatcgcaatcaagtaagctttatccctaggatgcaaggtgagttcagcatatgcaaatcaataaatgtattttattagagattttatctctgatttctttcagagacaaagaaatcagagacaacacaaacaaatggaaaaacattccatgctcatagataggaagaatcgacattattaaaatgaccatagtgctcaaagcaatttacagattctagctattcctatcaaagtatcaacattatttacagaattagaaaaaaacctattttaaaattcatgtggaaccaaaaaaatggcctgaatagccaaagcaatcctaagcaaaaagaacgaagctagaggcatcacactacctgactttaaactatactacaaggcaacagctaccaaaacagtacagtactggtacaaaaacagggatatagaccaatggaacaggttagagaacctagaaataaagccacacacctacaaccatttgatctctgacaaagtcaacaaaaacaagcaacaaagaaagggctccctattcgataaatgatgctgcaatagctggctagtcatatgcagaagattcaaactgaatcccttcttttcatcatatacaaaaattaactcaagattgattaaagacttaaatataaaacctaaaactataaaaactctagacgaaaacctaggaaatgccattttggacataggctctggcaaagattttatgacaatgattccaaaagcaattgcaacaaaaacaaaaattgacaaatgagacccaattaaactaaagagcttctgcacatcaaaagaaagtatcagagtaaacaacctacagagtaggagaaaatatttgcaaactacacctctgacagtggtctaatatccagaatctataagtaacttaacaagcaaaaaaaaaatctcattaaataatgggtaaaggacatgagcagacacttctctaaagaagacatacatgcagacaaaaagcatatgaaaaaatgctcagcaccacctctcattagagaaatgtaaatgaaaaccacaatgagataccatattataccagtcaaaatggctgttattaaaaagtagatgctggtaaggttgtgaagaaaggaatgcttatccactgctggtgggggtgtaaattagctcagccactgtggaaagcagtttggagatttctcaaataatttaaaacagagctaccattcgacccagcaatactgggtatacacccaaaggaatataaaatgttctaccgtaaagacacatgtacacatattttcatcacagcactgttcacaatataaagatgtggaaacagcctaaatgcccatcagtggtggactgagtaaagaaaatgtggtacatagacaccatggaatactatgtagccataagaaaaagaatgagaccatgtgctttgcaacaacatggatggagctggaggccattgtcctaaatgaattaacacagacacagaaaaccaaataccatatgttctcatttgtaagtggtagctaaacattcagtacatgtgaacacaagggaacaagagacactagggcctacttgagagtggaaggtgggaggagggtgaggatcgaaaagctacctatcaggcactaggcttattacatgggtgatgaaataatctttacaacaaacccctgtgacatgcaattttcccatgtaataaacctgcacttgtactccctgaatgtaaaataaaagttggaaagaaaaatatatgtgtatatgtaaaacatatctttctccatgtctgagttctgagccaattgagggatagccaaagaacccatttcatatggagttctaaaaattttgagaattaaagttgtttgtactgtctaggctccctatttgtgcttgcttagttcaaagtcttaaagaagttggtcatgatcctaagatgtactccatgtttgcacatactagtcaaagctgggattaatactcccagctttgggcccatgtctgaaaaaatccaactataatttcatctagagccttggttttcccaagtagatttttggtccccaggtgccacttgaatattttctccagttttcccagcccatgtaccctgtgttgaagaatagaggcattctaagcacttatttctaaaagacaaggaggaaaatgaagctcttaaagatatgctgtaaaacagccacagagttcacaacaccttatatcataggtgttcatgactcctaaaagtctgtaagcccaagaagacaagaccatatctttttcttagttaatcatgatggaagtattgtgcagatttttaaactagctttattgtggtttaattgacatacaataagttgtatatatttgaagtatatagcttgataagttttgatatgtgtataccaataaactcatgacgacaatcagataatgaacatatccatcaccctcataaggcttacttttgtcccttgtaatctctccatcttgctcctcctttcatccatccccagcccccatcctgtccccaggcaatccctgattagtcactgtacattactttgcatcgtgtagaattttatataaatgaaatcatactgttacatatatgacttttgtctgatttcttttactcagcataattattctgtgattcttctgtgttgtggtgggaaaaatcatttatttctttttgttgtggaataatattttattgtatggatatagcacagtttatttatatattcccaagttgatgggcacttattttgtttccagtttctgtgtatcacaaataaagctcttatgaacattcatggacaagtgtttgtataagcattttagttttgagtatatacctaggcgtggagtggctggattgtgtgagaagaatatatttaattatttaagaaactgccaaaatgtgctattttacatttctagcagcagtgtatgagagtatcagttactccataaccaagccagcacttcgtatagtcaggtttttacactttagccattgtaataggtaggcagggatttctcattgtggttttaatttacatttctctaatgattcacataaaaagatgttgaccatcttttcatgagtttatttgatctgacacttctttggtaaagggtcagttcaaatcttggtccattttaaaattattttcttattgagttttgagggttctttgtttactctggatataagtccttatcaaatatatgatttacacatgttttctcctagcctgtggcttgccttttcttcttgtaacatatcttttgaagtgctgtaatttttaattccgacgaagctttatttattaaatttgttgttttatggatcacgcttttgatgttgtgtctaggaaatctttgccaaatgtaaggtcacaagggttttcttcagtttttgcttctagaagttatctagctttaggcctatgatccattttgaattcattttttttaatattgtatgaagtttattttttgtagtatattaataaccatcaccctttgttgaaaagagtgtcttctctctattgaattgcctttgcaccttgttgaaaatcatttgctcgtatatattgggtctgtttctggactctcagctctgactcacctacttaggggcttgctgcatcctgccagtgttccccctgtctgcatcgtggtctgaaaaccctcttaaagcaataagctgaaatagttatgatattcactgtgtttgttttccttctcttagggatctatattctttgttgcctgatgtcaagtttcttgaaaaccatgatttcttatactttgtccatttgtttgtgttttgaggaaggagggtaaatctgtcttggctgggaacagaagtgtcccctattttcttagtgcaaagattgtggaatgaaaaaaatgggaacaaaaacgccagctagtaaatttttatataagtctaggcaagaaattatgacaatagtgatgtaggactgcagaaaaacttaatgattcaacaagtgcttgggaggttaatcgatagaatctgatgacagattagttgtggggagtcaaagagtagaaaactacaatgatacacaagtttctggctgagcaaaactggacatatagtggtggtgttaacatgtataagaaggtgcagattgggaggaaatagttgttgagtctttcttggacatgctgagttttaggtgtctagggtatttaattatagagctctaatgctaagaggaatgtccggggtagagttacagatttaggagtcaacaacacacaggtggctcttagaaccatgaggatgaatactgtgtcccaagctgaacaacaggacaagtgaaaagataacaggaatactacagctggaatcttatggaacagacacatcgaaggcccttagtctagctcaactcagacgcacctcgttctagctcatagtgttagagagatagcaaaataatatggagaattatgttcctgaagttagggaagggcacactttcaagagaaaagtagtgttaggtgttaaatgcagtagaaaaatcaaaggcagtgaggaaaaacatctgttggatttggtaattggggggttttattaactttgaagagtggttttaggatggtaattgagtcattttgaggttattttatttattcataatattaacacacatgtgtttcattaactagcttaaccctaaataacagatttgagttcaggtcttccattaaacagtatagatgagaggccaggtatagagagagttagcatcataattttgccaaaaatgtcttaggtccactatgattataaaagaaaatgtgggccaaatatgatgttttggaaaaaacaatcattctaaactaggtacagggctacaagatcagagttattaaattaggcttagctcaaattttgtctgtacaaacctaaagggtatcattcaaagagtctatataagtggtatgccctagggttgtacactatataaccatatgcagcctacctagcttagctgataccacctggtgcttctttaagtgatagatatacctcatcatttagccctgcaaagttaaagccccagcagcaggcttgtctttctgactactgtaattcatagagacttagcttagtaatggagcacattttcagaaaatgagttttaatatttttaatcctatactctaattcaatttttgatcactttgaatttataaacaacaaattgaatttataaacaacacatcagaaaaagtgaagaggatattaattaactagtgctttaaattataagagcccaagataacactagtaactatgtcagctgcgctaatgttttgaggaataacaaactgccattgctgtttgggaacttttatgagatacctaatgaagcagtataacttgaaaggcaatagatttattaaaggatcagtgacaaagaaaatagaattgggtctattttgctattatgagaattgctcctgatgcctgaaaacagttatatttacccattatatttttctctttttcttgagaattctactctaaaattaaaatttgtaactctcctagtgtctgtataagtcaaactgctgttagcaatgtttttaattcaagtcactctattttggagtagtaaaaaataatttaaatttctattgggctacaggtaatcctcgagcccttgcaaacaaaaaacaaagccttttctaagttggcatataaagtatttttcaagggaaaatatttcttagctatatagtagtatttgagaaattaacaattttgataatcaacattctccataattttaaaatttattttaggaggttaaatcccatgaattttgcttaaaaatacccatccccccaatgaaaacatactaagaagtcaaaatgtacagaacgtagtatttaagtactttctgttcctgtaaacaagacaaaacgaacatggtctcttggaggtccaggactgtgagactcagaataaagaggagacagaagtgttcatgtagaagttggcagtggtcgtttgtgactagtctaaaactgaaaatcccagaaaacaaacgaaaaacaacaaatgggttttaaagtcatatggaattgtaaagtcactaattgcttttttggtgattgttttgaccaaaattaagtgaacgattacatcttctctgtgtactagacccttgatgagtccctgaggggctcaggagacagaagtgaattgtggttgtagtggcaaaatagctgacagagctgccatagtaacaaggagccttaggagcagactctccaggggagaaaacagtcctgcagaagtggctttcctgaaactttacctaaagagaggggagtggatgcgtggtttctcatgttcttcaaacagagctttatgttgaggctgctgtaaagataacagctacaacacatttttaattgttgcatttcaattatgtaacacaaaattgaagtgatcttcaacactgcgaactgaaggtggtatttcatattggaaagtctatttattatactttatatgcttgctaatgctctctctcttttctcattttgcttcgttcctttggctcagtagaattgatggtatcaactaaaactttaaatgtaagtgagtctttatgggctgaaggggtccttggatggatggaaaaggatttagtcctgttattctttgttgtttttattttatttgctatgaagtttatttcctttaccagaaggggcttaattgcattcagtctgagtgtttacataaatgaagttggtgggtttgatacagtacagttcctcttttaagaacatctgtgaaagtaggaatctgcttattaaaatggtaaacctgtgaactgattttattgttatgttctccaatttagctgaaatggtatatgttaatggcttctacacatatatgaaatggcaaatcattatgccctctaccaactagccaggtttttaatttgcaaggattgaaaataatatttagtgggcattgctgagagaagatgaattaaacttcttatactggcacacgtgatttctctgggatttaactagtccagactgttcagtctgtcatttggtttttcagcccctgaatcctgcaatgggtttgcatttaattaggctttaggagaccttgaatggaaagcatgactttctcactttttggtcacgactagtatttgcataaaacttcattttatgcaacaaatcactgtgccaattttaagatcctaaagaaacttgaaactgctgaaaaaaataggctttgtttaaatgttttcattttctactccctcatgtttttttacttcaaaatattatccaagctttagtgtatatatagttgtatacatagatgagttcaccaaaaaaaagttataccaaagacattccataatccatcaatctctttctttaaaactaatagcagtgacaacatgtaacataaatatatatcttcagaatcctttcattgttcttctggcactttactaagccttagagaggttattaacttgcccacattggtgtaagcaataagcattatagcctatttctcttttcagggcacatgcttttaatcattggccattattccaactgaaaaatctttaattcttgattaaagcaaattcccatggtactctctaaaaggtgatatttttgtaaatcctcaaactggcctctgagtgtatttgaagagaggaattttcattcatttataaatacttcgctatttagactattaccactgactggccttctctcaaactttagaggactaaatgtactttaaacaaacatttctacaaatggagtgaagtctataatggtttcttttgctgctcacagatgttgatgaatgcacatcaaatccctgcactaatggagattgtgttaacacacctggttcctattattgtaaatgtcatgctggattccagaggactcctaccaagcaagcatgcattggtaaggcagtttgctttcacatatgaaaatgttccatgaaatatagtgaccaaggctgttgaggttaaaagtaaatttattaaaacatggaataaaataagtgttacattattacagatttatttgtaataccctcagagattctcctttaaacataaacaatgtttgcatatataacccaggcaacatggtatctgttttcacaaaaattcagtttatcttccttccttagatcagagcttcctttctccagataacatcagtaaccttctctgattaactgagtttaagatttatagtcattttaaactactgttttctttgaatcccacacatagtccaacaccaagtcatgcctggtctttattcacagcttcagtgctacacccaccaccctggtccaaacgcgctacctcattgctgattcatctcagaattcttttagcagatgactgcctgtcttctttttcatttcctattcatccacaggtagttgcttgaatcaactttccagcagttttcattgtgttactcttaatctagaaattctgtagttactttacacttatccaacatcttgttctgacttttaaggccttcatccactatgtgaaaaacagctgcaaccagtaattccagctgtcttgcccaccctttcttaggtttactggataccctctttttttttttcctttcccacttcagctactataagagctgtaaaattgcttgcacctacctatccaaaaaaaaaaaaaaaaactgctgagagacagaaattttgctaaagaagtaacatgattttgaatatttaaaattccatttcttatcttactgtgtttatctataagtattgtaaaagaatgatgtttggccattctcaatcttcctagatattgatgagtgcatccagaatggggttctttgtaaaaacggtcgatgcgtgaacacagatggaagtttccagtgcatttgcaatgccggctttgaattaactacagatggaaaaaactgtgttggtatggaaattgcctgctcccttgcaaaagattttaaaaggatatacatttttatttagaaccatgtactatttccatgaaagctcacacaccacgtatgtgagatcttcaggtaacttaggtaaaatgcaaatgcatttaatataagactgttaaagcaaaaggacaggttttttgtttgttttttggtttttttttttggtggtggaggggaggagatgttataacagtgaataatttactgcttctaaaaatttcctgtgtgttacaagttaaattgtaagtcgcagttattcttcataagtttaaacaattactgaccgctactgtatttcaggtgttggggttacaacactgacaaaatagaaaaggtcttcccttcctccacaaactggaggaatataaaaatgtttgacatatgcagtacacaaatctctaaaactgtggcttgtgatatctagcagtgcaatggataccaacacaccacagaaatattgtttacaaagtaacacatcatattcatctactaatgaaagtccagatcatttcatttgcagtgaggtctgccattgccttattttcttataaaataaacactcattgaaattatattatctttttggtacacaaagtaacactactcatggtttatgtggttttaacaggagctaagcacaaaatttgattattttcctttatatccatatactgaaggtcctttccactctccgcactattttttctcattcagttggcgttctttttttaaaaaaaactaaaagccatgagcacatggctcatttaggtagtggaatttgactgggggttgtttatggaagaagaaggaattggttccctcaaggccagtgttcaaagtcactcaatcctcttctgcagatcatgatgaatgtacaactaccaacatgtgtttgaatggaatgtgcatcaatgaagatggcagcttcaagtgcatctgcaaaccaggatttgtcttggctccaaatgggcgttactgtactggtatgtgtggctttcagataggaaagtgaccatgattgaaaccaccttttttatttgaatgaaccatggaagaattacttcagcttccccatgtggctttcatattattcacatttcttgctaattcactaaggcaggtgtctaaagctttctagaaaaacacacattgtggtctagggaacagtcatatcttaacaaaaataataatggtataggaaaaattaaggaactgacagattggttttagcaagtcttgtggaaaacaacgtagaaataatttctctcaactgcttggctgaataaaaaagaagaagaaaaaatcttgaaaggtttttgttttttatgcattctcagaactagattttccactgtcattcattatgggtttagcattacatcttttccataaagctaatatacagaccatttgtaactgtgtcattatctaaaaaccttacattgatttagtgaagacataattttaatatttcaattaattattttgtttacaaagccattttgaagaccaagctctaatgataaccttaataagctaaagttatacctcttggaaataaatgagaccttattatgtttgtactcacaattggaatttaataaagtggaataatacattttgcagcttctacttagaagcacatttttccttttcttttttaaatttatttatttttgagataggtttttgctctgtcacctaggctggagtgtagtggcacaatctcagctcactgcacccttgactcctgggctcaagcatcctcccacatcagcctcccaagtagctgggagtacatgcatgtgcccccatgcccagctaattttgttttattttttgtggaaatgaggtctcactatgttgctcaggctggtctcaaactcatgggctcaagcaatcctcctgcctcagcctcccaaagttctgggattacaggcatgagccatcgcacctggccaaatttttgtttttctttgtttccttccttaagacaaaattaactccatcaatgatgttctgccttcaattgcacaaacttaatctaagtaccagataaggatcatgctcaattcttataatttcaatgaattacaatgaaattctagggacagtagagattaaaaaattgagactgaattcttatgtttctgagtaagaaacaaatttttgactctccaagaaggaggagtactgtagttttgctggttgaactcatgactgggatgtcatctcagggttagctgatttagatttaacacaggataggaaattgtcattatgcttcagtgtgtagaattatgttacagtatgtgactttatttcagcctttttaaagaaacttcaatatacatctaaagatgacttcgacctcaccagtttctgctttctggaaattagttcttattaattatttaattacaaatgttgtgaagattttaagtattcctgagtcggcagctctgtgtttgaagtctctttcatcttttggggaagtcatttaatgctgggttacgtttgataaattcaagtggattgaaaattagaagacatacctcaagttattttgttattatcaaatgaccaaatgaatatcagcatagcatctacttctagttaaagtgtctttgtgtgaaaaaaattacagaaatttaccttaatttttaaagaatttgttttacttaactaatttgaattatttagcgttaaatgggattgtcaaataaataatgaaaaagaagattgtgaggcttttttttcctcagtaggtaaagtaaagcattctgaaatgtgttgaaaggattgcatttgtatatgatacctgttaccacacttatttgttcttcacaaattataaagttataaacaaaaggttagtagtatagagcagtggctgcaagtaaaccctgtaataacgttaaatttacccagtaactgcttggcttctgtcacccactgcacagatgttgatgaatgccagaccccaggaatctgcatgaatgggcactgcatcaacagtgaagggtccttccgctgtgactgtcccccaggcctggctgtgggcatggatggacgtgtgtgtgttggtaagtgaaacattttataatggccccactgtgcaaaatgatctttgaaaaactgacagagatatttctatacagtggagtaatattcaccataagaagagtacatgctaaaacatggataaaccttggaaagattatgctaagtgaaagaagccagtcacaaaacaccatacagtgtatgattccatccatatgaaatctccagaatcggcaagtccgttgtgacaaagtagattcgtgttaggacagagaggatgggggtggtgggagaatggggtgggagctaaaagatatttttgaggtgattaaaatgttctaaaatcatctgtagtgatggatgaacacatctgtaaatatgctaaaaactataaaattgtacactttaaagtgatggattctatggtatgtaaattgtatattaacaaagctattttttaatggacaggaacccccagatagcccccttcagaacctacagaaggctctgatgacatgctggagaagaaaaaatatatttttaaactagcatacttgataatattagataactgaatcctaaacacagtgcatttcagttttataattaataacaaataagatatgtaatggggattatagttataggtaagtaaacttggtttcaccctaacaaaacttaaaatataaatattggacttgcatcaaaagctcaaaatgttactcctcatcaccatgcaactagctgcagaagcaagagtataaagaagtatgagcaagaatatatattttattctaagccattcagattcctctaggttatttttgtcaaattgatcccatgaaaatcaatcagaagtaccaggcccagctttgaagaggcaggcaaaacagaagcgtcactggcgtttgggaaccccagcaatatattccagtgataaggatagcagaatgagtggtaaaaatacatttaatgcagttttctctccaaaaatgttttcatgaggcttctagggtgaattagccattgtataccctctatttttcatgttgtacagtaaaacacagaaataggatttcaaagtatatttgagagataccatattcttagacatagttaatactttactcctacctatgagaatcaaaacatatggatcccaaaggtggaggagaagaagtagagaatttgcagatggaaataatctgttcactcaaatttatccactctatccagtcaaagatttatttcaccctacaaagttgtcagcactttgttcagggatatttcaaatacagcagctagaagaatataacttcttcctgcttacagagctaaaatattttcagttgctttaatatatttacttgcttttttcctttacctaaatgattctgttgaaatctaccatgagcacaaagccagttttggagggagaaattatttttctcttaagtaaccaacatgcgagttgttgctaggaattcagtaaaacataaaatttcattatcttgttcacaatccaggaaacacattggaaattttcagaaagcctccttcagtttttcatcattgtggtcatttaaactttttaaaataaaaacattatttctcatgtgtataaaattatatattactgtttctataacatgctagatgttttcttcatgtcttttgacttgatgtcactttttagacccattgattctttaagtttgagatgaggcctggcgcagtggctcatgcctgtaatcccaacactttgggattccatgttgggcggatcactggagcccaggagttcaagaccagtctggccatcatggtaaaaccctatctctgcaaaaagtacaaaaattagccaagtgtagtggtgcatgcctataatcccagcactttgggattccgagtagggcagattgcttgagctcaggagttcaaaaccagtctgggctccatggtgaaatcctgtgtctgcaaaaaatacaaaaattagccaggcatggtggcatgtgcctataattccagctacttgggaggctgaggcaggaggattgcctgagccctggaggtggaggttacagtgagctatgattgcaccactgcactccagcctaggtgacagagtgagaccctgtctcaaaaaaaatagaaaaaataaatgaatcactgttatgaaaaactattaggataagcattttaattttagatctattttttgtttgttcatttttcttctgtagatattaagatgtgtttttgttttttgttttagtctcaggtaattaagctatgattttaagtagtatattgaaatacaactcacaagcaaggttgtaaacaaaaggcaatcatatctttatctttcccattcattcaaaatttatttttaagtttattcagtgatgcagtttagtaagtaaggaagaaaagtcaggcaacatgataactactgaatattcttaagtgacaaaaaattataagatgacagcaagatacaggacctctctgttcctcctttcctcttttgttgttttgagaattaaataaagctttgaatggtgtctagcacatagcaaatgcgcaataagttaactactactgatattattgttattaaattagaatagtggtatcatatctaggtcatagtcttaagagttgctgctttaagttataaataaaagttgattttaaagaaagaagaataaaataaagttagcattttgcatacatacatattttactcatggtatgtagaatctgctaattacctgaagaaatttttaaatcttttcattttttaagaaagaaaaggggacaggcatggtggctcacacctgtaatcccaacactttgggaggccaaggcaggtggatcacctgaagtcagcagtttgagaccagcctggtcaacatggttaaaccccatctctactaaaaatacaaaattagccggttgtagtggtgtgcacctgtaatcccagctactcaggaggctgaggcaggagaatcacttgaacccaggagctggaggttgtagtgagtcaagatcatgccacgccattgcactccagcctgggcgacagagcgagactccatctcaaaaaaaaacagaaggaaggaaggaaggaaggaaggatggagggagggagggagggaagaaaggaaggaaaggaaggaaggaaggaaggagaaaaagagaaagaaaagaaagaaaaagagagagaaagaaggagagaaaaggcatgcagaagtctgctaacatatggaaaagatgcatttaggtccagtctgtcaccagatcattcatgtgagcatattctcatggtgctaccggtattgttccttttatcctatcctgtatacagtggttctgttatatttgaatagtataatatgagctaggttgccaatttggggtctttgaacaggaaaaggtcagtagggaaatagtgagttatctcaactgatagttcacagtatcagttacagatagaactccttgttctacttttcctcccttctcactgctgcactttactagtcttagaaaaaaaaatagaagagggaaataaggtggtcaccattttttttagtatttcaggtgtgtcctaggcagtgtgcttagtgcttaacaaatatactttcatttactatacaaactgtatccttatttaatgaataaggaagatgttaagtaatttatgtaagatcatcttgtggggatctgaactttgggaagtttatgtccgtaaaacctacacataagttatgctactttctttttcatgaaacttctggtgttgggtactctaaagagattggttcacctgtaatgcaaactaccatataacatgtctcactcttccagtgagctccataggccttttatctgcttgcttttaaaaattctgcatggcatatgctctaaacccaaaagcagaaataactttggctgttcatagatgccttccaagatcatcagtaatgtccaaagaactcacaaaaatcatattggaaatgatgaaccatgttatatttgtgcaaatttgccttcaagtcaaatctgtgtttgtgtaactcagaagatacactgccaaactcagccacagcagaggcagcacaagtttctctgagttgactcctcagggatggggttggtgaattccatggcctccttccatttaagcacacacgtatctcatttttaatgcagccataaatcactgttttaatcagaaatgcccccaggtcataagaaattattggatggccattttgcataacaagcagatgaaattttttccaacaagttgtgaatagttacagatatttataatagaggttatctctggaggtatactggagtataccaggtcagtatactgcttaaaaattgcatgggttctctgccctttatgatctgagttttttatagttcaccatttactgtcttataaagttgtagggtattttatgagaattaagagtgagagaactaagcagaatatgcttctttggggtatagcattacttactagaaagaggaagagttttagaagtcacataaaccttgtctgaaccccaactcaggcactggatattcaaggacttcaaactacataggtagctgtgaacctcatcttcctcatctataaaatgcacgtaatgaccactcctatagagctgttgacctgactgttcaatgagataatgtctgtaaagcaacgagcacaatgccaagagcacatatggtagttaactatttttataactggatttactgagtttctgaggttaaaacagtcacaagcagtatcctgggggttgaaaagaaaggcctcctaactcggaaagtgggagtaagaaatctcacgcccaagccagtatcacctcaaggtagtttaacttgattgcacttcattgttcatgagaacttccaaaattgaaataagaagtgtcattttgaatatagcatagccagtgattagagctccaagtattctttataactgtggaaatatcctaggtttcacaaaaggtttgtaagaatacatcggacaatggatactgtgtagctcataaaacttattaaagaaaacagagtcggtgatatgcatccattcttttcctcactcagaaaacatttgttgatttcctaacactattagatgctaaagatgcaaaataaaagtctcagatgcccttgaaaagcttccagtctagtggccacttaggttaaaagaagccttctgtttcgaaatctctttgtctctatcactgcctcaagtcattgtttttgtatctcctttagatactcacatgcgcagtacctgctatggaggaatcaagaaaggagtgtgtgtgcgtcctttccccggtgcagtgaccaagtccgaatgctgctgtgccaatccagactatggttttggagaaccctgccagccatgccctgcaaaaaattcaggtagtcacatgtgccattttcacagttgataaagaatcaagaaatacaaccttagatgtttggccaaagagaacatcagctcttaagtgtttcatcattaattttaactgaagaagagaaatccaatcctgtattgatatgtgaggcatataataaggagatttggcttgtgtttatatacgatttctaggccaacagaacacacagtgaataaaaaaatctatttgctggctgattgtggtggctcacacctgtaatcccagcactttgggaggctcaggcaggaggatcacttgaagccagggtgagaccctgtcttggtaaaaaaaaaaaaaaaatcttaattagctgggtgtggtggcacacacctgtagtcccagctactaggggggctgaggtgcaagggatcacttgagcccaagggttcgaggctgcagtgagccatcactgtgccactccactccagcctgagtaacagagcgagatgctgactctttaaaaaacaatcaaaaatctattttcttatacagttatgattattataagagggtttttttacatgaacatgatagcctcagtttccttgatctgtgctgtcatggtgaagacaaatagcataaaatttacttaccactttcaaggttataaacacaacaagaactcaatttgattatatatatatgtatatatatgtgtatatatatgtatatatatgtatatatatgtgtatatatatgtatatatgtatatatatatatatacacacacacacacatatatatgaagatctctctctatatatatatcttgacaccaagtggtctcaagtcacagtctcaggcaatagttccaaactcttaggtcaataacattgactcttgtctgttcatagtttaactaaacctgtattgaatatatattgaatatacgtaagtacagtagggattctaacataaacacaatctgtgtttttccttaaagttaacagtagttgagaatacaggcaggcaaatgtataaattacaatttagtgtgattagtgccttaaaaggttcaagtatggagagagcacagaggaaggagcaatttgtagcccagggaagctgggaaggacctcaaagaaggggcacgtttagtttggtcttgaaaaaaatgagtaagaactttccatatggaggatacaggaaagcattcctgtaaaggaaatgtcttgttattcccttaaaaatcctgaatggagtcttcaaacgtggaaataatgatttgaagcatccagaagaattactgagtgtgactttttttaaaaaaaaaagaaaaataatgaggagaacgtagttctaaaatgtaccaaactgaattatgcatattatcaaataagttcaaaaattggcataagactagacaaaaacctaagtgaactaataaaatgaatctagaaacctgaatatgaataggaattaggatataacaaagcattttggagcagcaaggaaaaagattaaataataattattgttgataactttcagaaaaaaatatgaagttaggtccctacactaaacattaaaacataattttcatatagaatataaattcttttttattttgtaatggtaaaagactttcaaagcaggcctaaatagtaaaatacacaagtaatctggaaaaatatttttatttatcatttcttaatctttatggaatttacattaatcaataaggagagttgaaatcctctatagaaaaaacagcagtgtacataaacaggatttcagaaagtagaaatgcaaatggaagaataccatgtaaaaagatgcccactctccgtataattaaaaataaggtgccatttttgtttagcagattggtataaacgattgattcttcccggtgataatgagggtattaaaaaaatgaatactgtcttataccgctgatggaggggtaatttgggggcgttttaggaggggaagaactatctaaaaccttaaaaggggcataaactttgagagttttacttgtaagagactatcctagtgatataattaaacttcatattatttatgatagttgctaaaagttggacaaacctaatttcaccagtaagagattgactgaataaatgtgatacctctatgtaactgagaaaacaatattaaatggcctattaaatgggacattgacatgacatgcctgtgatagagtacccaggagccaagtcggcttctccacttacaacctctgtgactttggtcaagttactgcacttctctgtttcccccttttcctcagttgtaaaaaggaaaatacaatagtatttagtttgtggtattgggaagattaactaaattgatagatgaaaaatgtagaacaataccaggcacttggtaagtactataacctatattttggctgttattattttattagtgaggaaaaaaagttaaatatcaagctctttaagaccatttatatttttcttaaagtttccttatgtagaaaatattagtaacatttatatgtattaataatattcaggatgatgattacaagtgatttttactcttttatgcttatttataagttcagaattttataataattgtttgctagaaaatggtaatttttttcactttaaaaactaatgcacaaataattcttcctaatggtagttttggagttatgaaatgacttgtatatggaataggtatagttaagtttttaattcttctatttctttttgtcatacagctgaattccacggcctttgtagtagtggagtaggtatcactgtggatggaagaggtaactctagttaatctcaactttataataatcacgtgacataatcgtatagctttataattctaatattaatatgagtatatttaatatgaaaatgtagtattataaaataataagattaattatctcctagagcagtggttataagctagatgatattaagtgatatgtagatacacattttcatcttggataaatatttatctgttaaatatgcattgttaaaaatgtcactaacaaactactctcctgatttcaggcagtcattgcttaagaaaagaataatgtgacatttaagttaaaaaaagaagaataagtcaattttatgataaaacattaagtaatggtgcagatagggttagaaaaataaacagtattaaagagatatttgatatggatcaagtttgggatatactggctgaaataatttgttaagactatttacacctaagaataataaaacatttctctccaagtaaagaagtaagattcactaaaatttttcttgctttcaattttgtattatggttaacaaaattccaatatagaatcttgaacatttaagtacatatgtgtttgtaattttcagattcttttatattttaatatacatatagattcatttatacataaataaaacttgggtgttattaatcttcactatatatatgaatatgtatatatgaagagtatatataaatatatatacggttatatatatatatttatgtatattcttctacccttgtgtttgagaaagctttagtcaaattatagatggtaggcagtaatgttgaatctttataataaatatccaaaccagagtgaaaagtaaacttttaaaaggatgtttttcccaagtataaaatgaaagacatttccaaaatatttaaggtctcccaaattattgaaaacaatagcatcaaaatttgagcatagtgaccaaaatttgactttgggcttactctttcattatattccctgtcagtacagcctttccagcagagccagcctctattggaaactacttgatcattcatacaagcacatcagtgcacaagttccactgcccctcggtgatatagtagtagtagtcatgttcacggctcgttataaaacgtcatgttctgaagcatccatgtttaaagtgtcctctccagtaatttcaagtatcagcaatgagaaacacttattaaatattagtaactggacctcaaaaatgtaataaaatagaaatatcctgtacctttggggaccataaaattatatgggccaccctaataaatctgtcttttagttagatgattacaatatctatcaactcgagttttcctttggatttggagccaacagcctataaattgtctttattaatttcatcataaatgctggcatatttcgtgatttaactctttgaatttctgccagcgtctttcatttttcttttgatttaccagtgaagtgtcctatatctttcagttttattttcttactccttgttttcagttctttttcctttctgaaaggcaggcaaattgtgagtttgcagagttaaacacttcatatgttgaatggtctttactagacctgcatttatcaacaaacaataacatgtttgttgatagcactaaactttcaatatttaatgcagatatcaatgaatgtgctttggatcctgatatatgtgccaatgggatttgtgaaaacttacgtggtagttaccgttgtaattgcaacagtggctatgaaccagatgcctctggaagaaactgtattggtaagttatttgttatatttatgcaagaacatttcatatagtttaatcccatggattatattagaattaaaaacacaaatgactaaaactaaaaattgtacagtttttcttgttttcttcatattacacattgacaggaaaatatcagaatcaaacaaattttgttacacagtaacagacttcttggtggtaccaattcgtttttaaaatattattttccggaattaacatcctcaattatttgcctattgttttcctgcatataccttaatcctgtaattttttacgaagaatttgatttcaaaaattaacaggtcagtatggataaaagtaagtcaagaaaataaagtgttacaggttgagagaattttaacttcataaagaaacaaccagttgccacaatatacctaaacatgacaactaagacaaaggtatttccttttttaattataagagaatgattgaaaaaactgaagtatgtaatttatgtttaacaaatgcaagaggaggaggatgaaaaggtttgacagtcttatttcctattagtgcaagattttcccataaagcacttgagtggacttttataaaataaatgttattcaatccatcattgtgcatgatagttttacaactaatcacttatggcttttacaaccaagtgttaatgattatgattagaaaaggaacagatttttctgtgtttctggtagtggcttttactattgaacatattcgtttgatttggagttgaagacatacatacagatggatgtaaaagctatatttatattacgtgctataatagattttgataactacagggaagagtaccaggcaaagattattgaacatttctaacaacatgcaaaccatgctagtttttattctccagaagtgaaatccagatttcccctttttacatggacaccggtcatgttgactcacaacctaccctaacaacctcattataacttgattacttctataaaaatcctatttccaaataaagtcacattctgagatactgggttttaagatttcaacatatcttttttaagggacacaattcaatccatagcttagaaaaatgggttaaaaaattgtgatgcaagctggatgcagtggctcactcctgtaatcctagtactttgggaggctgaggtgggtggatcacctgaggttaggagtttgagaccagcctggccaacatggtgaaacccccctctactaaaaaatacaaaaattagctgggcatggtggcacgtgcctgtaatcccagcacccaggaggctgaagcaggagaatcgctggaacccgggatgcggaggctgcagtgagcggagacctcgccactgcactccagccgtggtgacagaccgagactccatctcagaaaaaagaaaagagaaaaggaagggaagggagggaaggggagtggagaaagaaagagagaaagaaaattgtgatgcagtcacaatttgtacacatattacactattatgggaaaagctatggtagtctagtccttaaaatataatgttaatttttaaagtatcaagattaagagttggagcaaaaacaagatcaagaaaggaaagggtcagataatacacaaaagaatattatcagtgatgatggaattgcagatgtttttctgatctgttttcaaaatctccacagtatcagtatattatttaataagggaaaattgttatttgcaatactagaaatgtaactttaagtgaaagagctcttcactctaaactacagggtttatttctttttgtcactaactacacttgcaaaaatggaagaatatgaagattaaaatgtgaggccaggtgcggtagcttatgcctataatcccagcactttgggagaccaagctgcgagaatcacctgaggccagaagttccagaacagcctgggcaacatagtgagatcccatctctaaaaaaaattgttttaagttggccaggcgtggtggcacatgcctgtattcttagctacttttggaaggctgtggcaggaggattgcttgagccaagaagttcaaagcttcagtgagctgtgatcgcaccagtgcactataaccagggcaacagagtgagatcctgtctcaaaaacaaacaaaaaactcattgtgggctttttaaactggagttttagatgatattctctaggctgttctggactgctaaaagagtatgcaaaatacatcattttcattaataactgtttctgagataaaaacatagtgggaaaagattaatgaatgtcttttaactgctgtttaatgcattttttaaccatctgggacatgaagacataaggcattctttttaaaaattttaatcataaaaaatgccttctgttacttttattatacataagcaagtatacaggcaaatgaatttaaccttttgatatcttttatgaatgctttaaaaatatatctaacataatatcattacaggactaaaagcaagtgaagtagagatgtgcctttccaagctagtgcatactttccagggatttaaaagcatcttaaaattagccactagcataagaatatcccatttgaataaaactaaatatattttgcttaggatgaagagtgcgctgtgatacagagactatgtcacagagaagaaagagggaaataaaacaaataacaaaattaaacattgctgcccactgtaatagatgcttaaatatgtgtatctcctatctttcaatcgttgctttcagacattgatgaatgtttagtaaacagactgctttgtgataacggattgtgccgaaacacgccaggaagttacagctgtacgtgcccaccagggtatgtgttcaggactgagacagagacctgtgaaggtaagagctgtcttcatcgccttatttgtgcatagtgagtacctggagttgtataaacatcaattacagtgatgaagcaatgtagtgaaaagaatattgtttgaatattttattttataatctcatttagctaatctgccagtttttgaaatagtaaggacctaatacagtttacaaacaccatcaattttgttccactcagacaaaatatcaacacacatttggaacaaacattttaaagcggataaaaaagaaaccaactggaaggagccatattgttttacttgctgaaatacaatgtcaaatatttgtttactgtgttttcctcttttcagaaccactatgatccattaatgtaggaacctgaatcgtaatggaaaagttaactcttaggcattttatttatgaaatgattgatatacccaagaagtcagcccacaaaatatttgagaactaagtaaaaatgataactttaataggtttttagtccaagagaattgtcctttccatttgataatttaaaagttgtcatttgagtttatagaccataactagtgtttaaaagcttctttgttttcttctaatcacatatttttgcagtggaagttacttaaatgagttaaatggttagagaagtcctcattttcagtgagatactggctgagcagtgagtacactgaattatgtttttgtatcttgatcaaagtactgtatatttcagaataatctgtggtatgaatactagtcattgttcctgtttaaatctcactgtgtgggcctacagaagggtcccataacattctcaaatccaattactactttgtaatagaaacttttaagaaaagatttcatctttgatgactgtggaatagccctttttttttatctgttaaagtatttggtttttttttttgtgatgccacagccaagaaaactgcagtagtaatagtatgcaaaaagatgtaacattctctcttcatcttactgtttaacttcaaagcattcttgtgaacagaaaccagttaggactatagaacaagatgccaaaacatgaatgactctgctgaagtcaatgaaatgcaattacaaagtgcagtgctaactttgaattgaatcagaggggccactaaaaaacagtaattagcctaaagaaaaaaaaaagaaaacttcagcataaaatcccctttttctaaacttacttctggtgacagtttcccctattgtccaacatcttttcaggaactcctcaaagaggagtgctcattccattcccactgaaagtacttgaagatttatcttttcagtaggtgagaaggggacacacttaagagtttgaaatatctttcaataggttatgagagtcctctttttaagccagctctggcttctcaaaggtattcaactacagagtctctattttctagatcctgctcccatctctaacaccaattcttcagaaatgctctgagaaatgtactttatgaaaaagtatcctagccatatttcctccatgatttccttggacagatggaagaagggatttcaaaggtttttgtttttcctgattttctacacttccttcccgtagtcttttttcagttttgtctgttgtctgttggaggataagcttccgttaaatctcaggaaacttagaaagcaagagcagggtaggacgtcatcttgatttaactaggaaactgatgatttttagaactggtttctctgtctaggaaaatactttctggtgctattgtgagagacacgtaatgcggaactaaatggatagtgtctggttctatttgctatgtacactgaattatcaatgattatttatagacaagtaacatagagtacaaaggttctgagagttgaaataccaaagaaggtaaaatcagagactcacctgcttacatgaacagttaagagtaggagctggtggtgtttaatagtgtaacatttggtgattatgtaaatattaaggcactttcataccaaatcaggcaacagtgagggttagaaacagtgatcttcacttattacaagcatacttaatctgagagatttatttaatgtaaaaacaattttatgtctgtcattcataggaaagaagttcatgttatgtaaataaagaagaaatgatagacaactcttttggctccagccttatgacattggaggaaataaaaatgatttatcatgggaaacctaaccaaataactgttatttctacactttcttcccactgttatttgcattttattaagagttttgcaaagaatagacttgaaggctactaatctctttttcccttgggtcgctttcttatttcctctgttgcattcaaacagtaagtgtttctgtctgaagcagttctcttcattctcttctttctgaattaatttccaaagactagacagggaattattagcagattcattgcaaatcttagctttttcttgtatatttgtcttgtgcactaattttgtttgtcaatcatgttttcagagtattttaaatatataacaaatagcactaataataaagagagtaaagttcttctatatttcagattgaagttacagaaactttattttactttttttgtttgagctatgagagtctgtgaaagttaaaatttttacagcaagcactgtggtttagattgtgtttccagtgacataactagttaaatgtaaaccagatgtgctttgaagtttatttccaggaatgtacagtgaactgtttcaattcctggttccatgacatttataacataacaacatattatttaaaggaaaactaaatagttgatatttgtagttgtcagcgcatatgtttatagtttctgaattcataattgcttaatttaaaatagaaattttaaaaacacacaatattgaaattcttcttttttcaggcttcttacaaatgaaattaataggagaattatatgtggtctgtccttagatttgttatctgcttcttttatggttagctagtttcttttttacattgtgtttttatgaaaaagtttctctactcggattgatgttttcattagaaatctgtgctatatttacaaaatctcttcttgtatttttaagaggttttctcagtataaacaatctgaaaagcaaaatacattcatatttcttcaaacaatttctatttcaagaattaaattagcacctggatattccgctgcgagccttgctctttcaggattagtttagtttaaagtcctctagttatttgtttatgtgctttcctcagtatagtaaagtgctttataataaattcaaagaaatatttagagaaagaaaaagtattcttgtgaacctagaaaccccagtgttcaatataaaatgccttgaggactattgacctctttcagataatttagtagagaaggaaaactgtgtgccacttctttaaagtgtaccactttaaaagtggttgaatttatactgaaaatgtctttgattttttttatagtactttacctgaagcttgtatttctttttcattaactcatgtgttaaactatttcacattacaggcttgacattttctgtaatcaccatttgagaacataggcatagtgcagttctgcttacttctgaccatcaacaggaattgtttagattatggtatatgatttcatttaggactcaaatcaaataaatggtagagtcccatttaaagcaattatttctacttgatcaagtatttctaatttttattttaccaaaattagttgtattaaaaaaaaactaagcaaactaaacatgtaaatgtgaacagctaaagacagagaaggtggatagggactagaggagagttatgtacccaccatgaatgtttcagtccttatttcctgattcatacccaagagcttggaattaaagcagcattgtgatattttgcatctaagatagactttttaagtttttcagagcctcatgaaatcatcaaagcaatcaacctttgtttgtgcacaggatgttgcacctggaattgcatcttattatgtgggaaaaaaaaatccaatttatgtaaagttgtgatgatgtattgaaggagcatgtaactgaactctttcccaataggctgatcactgtggtcctactgagttcccagtcctatagatgtgtatccacgatgtaaaatgcatgtctccattccccattcactttatgcttcatagatccatattaaaattaccagagccaagtttaccagacattctggcattgcatggcttgttggaataatattttccagaaacacatggcagttctaacagaatcttttccttctggattgtagatataaatgaatgtgaaagcaacccatgtgtcaatggggcctgcagaaacaaccttggatctttcaattgtgaatgttcgcccggcagcaaactcagctccacaggattgatctgtattggtaagattcatacacaatactgatgcttcaatttcactgccaagataagcacagatctcaggccttactacggataaaaacagaatatgattccaaaaagcaaagaattacacattatgttagttgtttttactcaatatcaatatagaggtaaaacataatagcattaattaggcagcctattcaatttttgttagattctagaaatcttccttttatataagtagatatattatgctataacttataatcatttccataccacacacatatgtatatccgttaccctaaaaatgccttgggcagcaatataatcaaatctctactccatacttttttataaacaaacttcaatggcaaacaaaaaatgtgatgaaatttggattcagttaacaggacaagaatttgaagcttttaaacacatagagggaatttattattttttcttttttccatcaatcataaattttggggctctaaggaagagaagataactgttctcttgcttttggaaatctctaggggaaattattctaaaacatctaaactaacatctttcaatatgtctcaaaacatttaaagtcagttcttgataatgacatgggatgtatattaagggagattgatctgttactgcaaggaaaaatccagcacgtaaaagggaacaaaactgtcccagtaatttttccctacttctagcctctgtggttccattcactaggcctacacagttcacatcattagctagtatccacctttaaagtgaactaaatatatattccaaataggaagatatttcagttttacatagtgccaaattaactggcagtttttattatctagccaaaatgaatctttagtttcatatttgtcgaagacaatagctttttcagtattatgtctgacattaaccatatttagctggatgctagagtacctgtttgttacataaagacaaatgaccaagtccaaaattatcaatgaaaaccttctctttggaaacaccaactcctcgtttcccagtgaggtacagctggtgaaatctgagccttgttcagctcttcatattaggaaatagactgccatctgcctggggcattactttttttcttatagaattccgggctgggttgggggggcggtggggtgtgtgggttggagccactaaagcagaaatatttttgctaagccacaatttccaattgagatggagtcattttattatgcaaaggaaatgaattcagcattaatcaattaatgtctcagaaaactaaatctgcatgccacttgagcatcaaagatagtttttgcctcatcatgtagacttccattattttggccttttgcccttatatttattaactaaacaagaacaaagacttttttacccccaagtctttatgtcattcttccaattgccaacaactaaccaccaccatatttttctcagccagtgtattgtgtgctttcatttattgtgattaaatttgaatatcccagtgtagagcagctcaaaatgagatttccctaatatttttaaagtttagacattatttcatgtacttttttattaaaaagagaatctagttgaaaaagaaaataacaaatagtaaaatatacacaggacaagtcatgaatgtataataggactgtcagtggctctcatcagtggttagcctgcaactttctcttccacaggtccaggtcattacattttgaaatttcatgatgtgattactaatttaaaattacattagattatatatgaattagttggatactatgaatatttaaagatttagaatctatttttcaagctttctaaatataaattaatcttcaactattctgcaaactgcttaaaaagactatggtgttctggttgaatatggttaaatgtaatagaacaatgcatttgattaatatttcctgcattatactgctgtggtttgatggttctatataatccagaccagtttccctcatctttggcttgggtctgcgctctgtcttcaacttgcatggatatatggctgtgaccactctgctgtcaaatccaatggtctattctcattcctcaccttagattattagcagtatttgtcacagttcattaatcattctttctcaagaaattttgcatttttggctttccaggcacaactatcttcttcttctttcacttttatggcacattttctctttcctttactgagtcctccctatcctcctaacctttaacctgaagtgttccaccagtccgtctttggacctctgtttctctttctacactcatcctcgagagcctctgtgttgactctcacatttgtcactctagttgataatgaaattctaggcctcaaccttgccaccaattccagatttgtgtttccaactgtctgtacagtgtctccacttggatggctcatcgatatctcaaattcccatgtctaaaaccaaattcctgtgtactggcttgaacctgagtctcccaggaacatttccatctcagcaaatggcaaattcattcttctagctgccaccccttaaaaccttggcagcatccttgatgtctttttctcaagctgtatatgaaagtcatcagcaaacctattgattgcacttgaagtttatccatatttcaaccccttctcacgatcaccacaccaacccccaatccaagtcaccatcatttctcttcgtaattactactgtagcctctaccttaccttcttttcctcatactacactcagttctccacatagccactaggcagcccttttaaaacataaatcagagcatatcattctttgtccaggaactgtgtctaggaaatcctaggcttctcatttcattcagtaaaagctcaagtcctaaccgaagcctgtgctcccctcatgatcttgctcctgctgtgaccttgtttccctgtgcctcccaccccctcagcctgagccagactggcctacttcctgctcctgcgtcagacacatgcccacctgaagtccactgatctatctggcaggaatgtttttctctcgggtttgcagggttctctttatgtctgtattcaggtgccacattgtaagtcacgatttctctgaccatcctacataaaataacagtctttctcctgtttctcccctcaagctaattaccctgctttattttttgagagttcttaactaattcctgactatctacatctgtatctcagttgtgtgtgtgtctgggggccgggatgggcatacacacacaacagtgggtcagtggggagacagggagggaggatggaggaaaggaatcggagagagagaaggatgagcctgtaggggggtgcggggtgctatcaatggatttgtagcttttcaagtgttgatacagcaccagcctaaagaatcacagtgctacagagtgagggctttggagtcagactgcatgggcttgaatcttgatgctgacactgtactagctgggtgaccttgggtaaattggttgacctctgtgtgcctaaattttctcatctgcaaattgtacataattcacagggttgttttaatgagtaaataaattaatacatagaaagccttccagttcctgtcactatcttgataaatcttagcaataactgttgtttatcttacttaaaatgatgacaaggtgataaatcagaactagtccaggtcattaaaagatcatttaaatacacagtagctttacacaaacatctctgtttcctctgtgctatggaatttacagatgtaaatctataacaagcctgcagtttgagacctgacacaaatgcttctctacagttttatccaaactgaacattccagccagagtgaaaaagcaaagtgactgtccagctctttttcacacctttgccctgtaactttttattcagtacaggagagaattgttttgtttcaacctctgtcttggtgtttgggttgttggtaacttcttgtgtttcctagggaatcagaaattactatttctgccatcataggcccatggtttaattgtaattccctttctgtgtttgggggcaggggggtatttttgttgttgaatttagaagtaaaaacttttttttttttttggaagacagggtctcactgtgtcacccaggctagaatacagtgacacgatctcactgcagcctctgcctacggggctcaggcaatcctcccacctcagcttcctgagtagctgggactacaggcatgtgccatcactcccagctaatttttgtgttttttgtagagacggggtttcaccatgttgtccaggctggtcttgaactcctgggctccagcgatccgactgcctcagcctcccaaagtgctgggattatagtcatgagccactgtgtctggccagaagtaaattttatctgtacatattattaaaatgaattttcaaataaatactataggaatacacttattctttgttttcttccaagtcttaatgccacaatatgctgttgaggttttggtaaagtgttttccacatcactcacatcagaatcacctgaggagtttgtcaaaattcagattcctgggctgcataccgggaaacttatgaatcggcattttaacaagcgtcttggtaatattatgcacacttaactgagagccactgctctacaaggaaaacatgacatatgatttgttttagccaattagtatttgctatatcagctttgactggattccttatcactgcttcaaaatcagttaacagtcatttattatttgttcatttgaaaaacttttcattatgccaccaaaaatatactaaccattcgttattccctttaatccacataaaataaaaattttaaagtgcataatatttcactgggtactctaccattcaaaaggaagaacaaatttgatgtggagtcagtctaaaacgttaggaatggttatctctagagggttacaggtgatttttacatcttcctcatacttctctatttcttcaaattgtttaccataagtatgatttactttttgaactagagataaatctacacacacacatacacacattttttaagtgcctgaaagaaaatacatcagatattagccctgggaatgcattagtgagggttttataagtgatgtttattccttcttcgttttatagggctttttcttttaaattattcatcaaataattatcttcagctggagaaatattggcctttgcataacagaacatacattgtgtgtgatttatttagtagggacttaaggtagaaggaaaaggattttatacgataaaatcttaaatatcaaagcatttgtcattaaggatatatcttatgaatacttttcacacaagtgatggtcttatcatgttgttatagtatgttaaaagaaaaaaaaaaagaagggcggggcgcactggctcatgcctgtaatcctaacactttgggaggctgaagtggaaggattgcttgaggcctggagttccaaaccagaccaacctgggcaacatggcaatgcactgtgtttctgagtaccagcataaaatcttggacaactcctcttagaatatcaatagatataattatattaattaccatattatgtgagagagatacatagtataatattttatttacatatatgtaatataccatatttgaatgcaggtacatgaaagtattttcaaagtatatgctattaaaattttttcttttttttttttgagacgaagtttcactcttgttgcctaggctggagtgcaatggcacaatcttggctcactgcaacctctgcctcctgcgttcaagcgattctcctgcctcagcctcccgagtagctgggattacagacacctgccaccaagcctggctaatttttgtatatttagtagagacggggtttcaccatgttgaccaggctggtcttgaacttctgacctcaggtgatccacctgcctcggcctcccaaagtgctgggattacaggcgtgagccactgcacccagccccactattaaaacttttaaagtattctttttttttttttcctctggtggagatggggttttgctattttcccaggctggtatcgaactcctgggctcaaatgatccttcctcctcagcctcccaaagtgctgggattacaggcgtgagccagtaatctttcttttttagaatactgtaacaaatgccttttgtgtacacagctgaattctattttcttcagaggtaagagctccccaacctttcctgttccttttcagacagcctgaaggggacctgttggctcaacatccaggacagccgctgtgaggtgaatattaatggagccactctgaaatctgaatgctgtgccaccctcggagccgcctgggggagcccctgtgagcggtgtgaactaggtaggagccttattgggagcttctgggcttctccttggaaacttctcctgccactaggacacctctttcactacgcagttccttagtgaagaaggtcagagatcatttacttttgctaaaatgttatctttcctggctaatgttttttacctcttaaaatgtgtatttgttttatcctggtacataagcaggccttctaaatattttaacatggaagggaatcagctagaatctatctgctagatgactgtatcctctggtatccttgtttgcgtggtggctgttttcctcaaatcttttgtttacttttatttttttgagacggagtctcgctctgtcaccaggctggagtgcagtggcgtgacctcagctcattgcaacctccacctcccgggttcaagcgattctcctgcctcagcttcccgagtagctgggactagaggtgcccgccaccatgcccagctaatttttgtatttttagtagagacggggtttcaccatgttggtcagatgggtctccaactcctgacctcaagtaatccaccctcccaaagtgctgggattacaggcgtgagccaccgcgcctgacctgtttacttttaactcagttgtcaatgtgacagcaaaaagaaattgtaggaaaaattatgagaatctcaatacaggtcaataccaatggagttaccacagaaagtcatgtgccctactgaatgaagaggggacaatgatgtccttggaccctaagaccctgccttgcattttttatttagttccatttagatttcattatacttcttcttgagcataccatggttgtattttattctataatgaagtaaaatttgtcctgttgttgttacagatacagcttgcccaagagggcttgccaggattaaaggtgttacgtgtgaaggtgagtgtatccttccttggaagatactatacatcttttgagcagtaagtaaaattaacattcactctcaaactttggagatatttatcattttcaaaaaccttgacatttcaataaaaatactcgatgtaatcaacaaatgctttagcataattctcttaggaaagagcttagagtttcccgtttctcctctttatggagttgtgtaaatttcatgaagacatcgctagcctttaaggcccagaacagctgggaaaggcacatgtctgggccatgttttatggacaggcaaggctgtggtaattttcacagctggtacctaggaaagcgggtggctcggttgtggaatatttctgtttaactcaagtaataatccacattgtattgaatgtggattgaaaatgctatacaggaagtaggaccacacctgctttttctatttgtaacatctttgctcctctgcttgctgcatttccctgcagatgttaatgagtgtgaggtgttccctggcatttgtccaaatggacgctgtgtcaacagtaagggatcttttcattgcgagtgccctgaaggccttacgttggatgggactggccgtgtatgtttgggtaagattcacaccctcatgtattctatgtataaaacaagccatgaatttccttgtttaagcagtggctagtccaaaaccacaagagtttgtacttgagaaaacttgctttaaatgagatatttagggggaaatcactagaggctgttttaaaagtgaatgtatttatgcgaaattgtttctgtttcatgccaaaagttgggactgctcaaaaatctatctcaaaatcttccatttctttaaccagataatttagacaggttcagtctttcacactgagttaatagagtaagaatatgttgaacacagcaggaaagttggagactaggattttaaaagtttacatttgtcagctcattgcagctacaccctgaagacagtggggaaagtcaagagcaaagatatgttgcttctgcttgaaatcattcactgatcctggtccttcctttattgctattagagtttaagttttcttaatagtttattttttaaagatctgtagtgatgaatctctttctttcaacagcatattataggaatagtgatttgacctttttctttattagtgtcatgtttgaacttgaatttcatgattgaaaaagaaatttctattaattttcattgtatgtaacaataatttttcatttacctacagagattttttttcccccaataagctatggaacagtaaatttttagtttataaaagaactttacatagatttgtatttgaaatttagacatgtagacaaagcataaataatagtggtggtgtatgcaatcacctttaaagtatttacatatcagtgatttttaaaatttactgtaagaaaaaagtttgcaataccatacagttattataattaaaacagatttcatttttaactcagtttttgatagcacatttaaatctggattggaagcatgactgtaaaatcatacaaaattatttagaaaacataatatccaaagtacaaaaataaagaaaatgtctttcagatttttaaatattttaaaaattatctttaagtgatctacaatgtttagaaataagtatcatttgaaaatgacaaaatattcccccaaaactatcgaaattttaaaaaaagaaaatgtcaaaaataataatatcagtatggccaaatgactaatgaaatcaagttaccttctataatgaaatgctataatatatgaagatatatcattgattgtaaattattactcagcaaaataaattttcaataacattattcaaaattatggctgggagtggtggcttacgcctgtaatcccagcactttgggaggctgagacaggtggatcacctgaggtcaggagttcaagaccagcctgggcaacatggggaaccccccccctccccgtctctactaaaaatataaaaattagctgggcatggtgatgcatgcctgtaatcccagctactcgagggactgaagcaggagaatcgcttgaacctgggaagtggagattgcagtgagccgaggtcgcaccactataccctagccttggcaacagagtgaggctctgtctcaaaaaaaaaaagcattttttaatattctaagatgatatattggattcttcatccttgtactttgcttaaatgcttttgtcaccacttgaattatgctatattaattaattctgtctggggatgtgagaaagtttcaagaagcaactggcacatgaaaatgtaaagtattctgagaactaaagttttggtaaatgctctgatagaacctcatctgaatcagggatcccaaactcagatgcttgcaggagccaagcatgtaacatataaatgagtgatgcgacaacagggagcagtggggactgcagcaaacttcagagaacatggaccatccaaaggtttccaaattcatattttaatttccatgcaaggacaatcgcagcattgataggccttatgtggccagtgtactgacgtttaattcctgatataaatatagagttctcagtagtgtgctgacttttaattgccgatataaacatccatagaggtctcagtattaaagacaggattgctcttcctggctgttataactttttacatgcatagttcagatgcctttcccctctcaccctagtttattccaataagctatgaaatggtacatttttagtttgtcttgagcttcttgagcaggtttcttcagtaacctcacagtatgactcaggccagagttcttaggccacctgtacttatataagactttcacatcttgagaagattcttacttagctgctgacatatgggacggaaccagctataaggagactagcccctcagagccctgtgataatgagacgctggattactatcacacttcacactggcaaagcatgtggctttttggtttgtgttaatgtagatatataagacagaatcaccttctgtagatatctacattcagtctgctgaatcaaaataaacatttaccacagttattttttccttaaaaataggactttttctcaggtagctgggattacaggtacccagcaccatgcccagctaatttttgtatttttagtagagatgggttttcgccatgttggccaggctggtctcgaactcctgacctcaggtgatccagctgcctcagtctcccaaagtgctgaaattataagcatgagccaccacgccacacctggtctgggcaacagagtgagactccatctcaaaagaaagaaagaaagaaaaaaaatagaactttttaattccagtactcagaaatgtaactcattaccttttagaacttgaaagaatcaatattgacagtaactaaagtagtaaacattaatttttatgtgtacatttccatcagggatctcattccctccgttagacagttttcagcttctggaaaggatttaatgtcttaaaatgttcttatcaaagaaatcatgctatttgattaaggaaccgtttccaaactcattatccatatttgtaattaaacagccaagtgctttagtatgatttgaaaataaatctatttgctaacagatgaacatgttatttatagaccattctggtctactctatttttagatgtaggcgactgtttatagatattctaaggtcctggctagcacaggctaagcactgaaatgttggtctgttttgaagttggagggaaaatgtgacatttaaacaaataattggtcccttaaaacggaaaattcacataatccagggaaaaaccatgatgcaaaaggtaaagttggcaggagaaaaaaaaaaactttaaatgtaataatattataacactttcttttgtagtgatcttaatagttgtaacaaattggcaaatagattatagccgatcatttactgtttatgaatgggatctgacagggctgcttaaaaggcacttgaagcaattctctgaacaggaagaattatcattaaaattatcttactttttctaaagtgaacaatacaaaaaaggagtaatagacatgaagcagtcatctcatgagaggaccttttcttcctgagggtttcttgtgagaattaagactgaagaggatctcacctttgttctccttaaatgactgtcattatggagtccattccaggaggtcagggactgcatcttgcccaccagtacaccgcaagggtcctgcatgatgcctggtgctgagcagacgcttgacatgtgactgttcaatggatgtttcaactcattctcaccctgtgatttcgttctcggtgtagatattcgcatggagcagtgttacttgaagtgggatgaagatgaatgcatccaccccgttcctggaaagttccgcatggatgcctgctgctgtgctgtcggggcggcttggggcaccgagtgtgaggagtgccccaaacctggcaccaaggaatacgagacgctgtgcccccgcggggctggctttgctaaccgaggggatgttcttactgggcggccattttacaaaggtaactgcctgcggccagcgccttggtccttcttcaccaacaggaagccttccacattctctgagaattggttttgctttaaatgtttgacttcccactttattttctcagttaaacttaggttttgtgaccaatgttctgtcccaagagtataaatcccctataagatggcattgaagtaaagagataaaacagattgcttatctttctcttctactctttgttcctctacaaccggagatgtcgccctgatagctacatctgtagcaaaaagttacctattcccacttatctttataaaacaagtagtgagaaataaaggaatcagaactctttcttaagcatatagaatctttggccgggcgtggtggctcacgcctataatcctagcactttgggaggctgaggtgggtggatcacctgaggtcaggagttcaagaccagcctgaccaacatggtgaaaccccgtctctactaaaaatacaaaaattagccgggcgtggtggctcgcgcctgtaatctcagctactcgggaggctgaggcaggagaatcgcttgaacctgggaggtggaggttgcagtgagccaagattgtgccattgcactccagcctgggcaacaacagtgaaactctgtctcaaaaaaaaaaaaaaaaagaatataagatctttttcaccatattgaaacttcctgtgtgatatcagtgtgatcactgaaacatttagtagccctgttttttacttggatgcattactgttgtccatcatgatagatttttaacttaaagtgatggacctaatcgtttatatcaaccggctctacattctggcttcattctgcttttagacatcaatgaatgcaaagcatttcctgggatgtgcacttatgggaagtgcagaaatacaatcggaagcttcaaatgccgttgcaatagtggctttgctctagacatggaggaaagaaactgcacgggtaagatggttctgctgttttatttgataaactctggctgtctttcctttactctgtttgaaaggactgccctaaaaagctaatcctctcattgagaacatgaaaatttttatttatttattaatttctttttagagaaaaggtctcacttagtcgcccaggctggagtgcagagacatgatcatggctcactgtaacttcaaacttctgttctcaagtagtccctccacctcagcctcccaagtaactgggagcacaggtgtgcgccaccatgcacagctaattaaaaagttaattatttatttatttatttattttaagagatggggtctcactttgcttcccaggctggcctcaaactcctggcttcaagtggtcctcctgcattggcctccccaagtgctgggattacaggcttgagccacggcatccagctctgtaaattttttaaatttcttttctctacacttaaaccagttctccaaataaactcgttgtgagagaactgcaaaacatcatgaaaatgctgtttgttttatatttaggaacagcatacaaatatgattttcaaaatatatgactactaaagaaatacagtcattaaatccacaagaattatataaacttgagtagtgttctcttaaagattttaaggtttgtgatatagaagttattacttcttttcctcatctgtgaacaggaatcttaatattagttttcagtcaccatccatacccataacattctctttgaacaagatgtgaagttctaactttttctattagtataccatgttgttccagacccttgagctgtgtcttcaggatctcgttctcagcactctctttgttcgtattctccatgggatttccccttatcgcactccctcctgcctgctccttcttcctgacctcacggccacatctttcttggctctttcctgtgcctcctcagccaaggctatctctgagcttttcacagctgtccatctggctttctgaagtcctgctgccttgaagtctgctcaagccctgtgccagtctccagagcttcatcccctcacctgttttctccactctggctgctgcacttggctgggagagtctgaggagtgctgcctgagattactgcattcacctccaagtccttgaagctgcttgacaacactcatattcacctccattcatcactttctgaattcctctcagcactgcttctaaacctcttccctgacttacatgccctctcctctaccctccacccccatctattaccgttctccttcattgagaataaatctgattgcctgcatccttctcacacagcctcctctctagtgataacatctcctttatcccgctgggcatggtggctcatgcctgtaaccccagcactttgggaggccgagacgggcagatcacctggggtcaggagtttgagaccagcctgaccaacatggagaaaccccgtctctactaagaatacaaaattagccgggcatggtggtacatgcctgtaatcccagctactcgggaggctgaggcaggaggatcgcttaaacccaggaagcggaggttttggtgagccgagatcgtgctattgcactccagcctgggcaatgagagcaaaactccatctcaaaaaaaaaaaaaatctcctttatcccccactccctctcctccggtgacagagaatgaggtgtgatgctctacctggatttggggttaactcctcttttccctccttcccagctcctgctctgggttgtctcagcaggttcgctcctctctcctctctctagcatctcctcttccctgcttcctgttcctcaacttatacacaggttcaaaatatctcctcagcccttcttttctctcaagctaccatcccgttttcctgctggtaagtctcacccctctctttcaaccagccatttgtcctgtaattttgacttttgccctctgtcactcaggcacatacatgtatactcatctactcttgcaaaacatctttgtggtgttaaaacatctctcctggacctctgcttgccaaatctctccttgagattttcttttctcttagtttctgtggtattttccggtcttgatcatccttctatgcagatgatgtttcttctctaacctctacagattcttcttgcctttcccatttcttgggtgttgccagagtcctctactcagcgtcttgcctctcagagtttcatctaccatcatgacttcagagatggcctctgctgagctgactcccagaccctgtctctaactctctctgttcttcctgagtttcactcccacatttataacttcccatctggaaagtttgtctttgttttgatctttctttgctcttccccctaccctgtactttatcctactagggacttccctgtatgcattaggagtataattttgaacaggattgaagcctccaattgaattttgacgtctctctctcccaaagtgaaaaagttatgcgaattctttcattaaactggctatttcaattacctgtgatatttcttcagacagaggcaggttaagctcctcaggaaacagactccaaggcagagaagagcattcaggaagtttatcggggcttgctcctgggatgaacaatgaggaagggaagggaggaaagcagaagtgggcagagaaagaaatggggctatgatgcagtcccactgaagtcctcagcccatgccactgggagttctggaactgggatggcccatcagagttgccttgagtagggcatggaagccatgcagttaggtacctgcaggaccaatcttgggatacagctgcccagggaatgggggaagaggtcctcttagaatagtgggcatctgagggctttctgccagcgacactaccaatagctgacggggagggggagtaagtccttctttcctgaagagggacctgggtgacatgtcacagtatctactgtatcacagactcctccaggatctcccaacctgttaagttcccacggtcaaatccttcactgccacaacccaggttaaccatccaagcagggctggattgtgtaacttcccactgaacaacttccactggtataggcaatcctggtgctggataaagaagctcagggttcttccagttctgaccccacctcttcctttgttgtgaaattagccaaagttgcttaatgtctctaacacattcacagggctgcattgctctggatatactgtgaagttctgtggaaaattgttggctctcatcttcacagcaggaagggccggtctcctcccatgctgggggcttttagtaatcctaccggtccgtcctgtacccacactcattgtcagcctctccagtccagccaatctgtggcttactgctccctgaaatgcttcctttctcttcaccggtgcgcttcatctcttgcctctctattctgtatctttaaagctagcatttctgtacaaccttcaagaaccaattcaaaagccacaccctccaaattacccattcttagcagagaagtttgcatatatatatatagagagagagagagagggagagagagagaaagagagagcactttctatgagacaggcactgttctcagcacttaacaaatagtcatttaactctatgaggtggattctatgacaaataaggaaattgaggcacagagagactaaatgattttcccaaggccctgttctcagtagatgacagactgggatttgtagccaggtatctggttctagaatccacactgtttatactatgaaactcccaccacatcacattagccaaagattgtccctgctccaccctagaacacattcctcatatgactcttaacaccagtcctagatactgatagatagaaagaaaattaatatacatattgttagctacttaattgaatcaataaattctgttaatatgtttgtttaaaagaaagtatttacatttttttcgcatggccagtaatgagggaaataaataaagactcctgtaattggagaaataaatacagaaaaactaagtaaaagctggcagaaagcagagactgagacccccctctcaagagaacatgcacaaattatgcactaaatcctgtgattttaaaacttcaaaattaagttcatcaaaataaagagatcgtagtggggcatttttccccactgacagatttttagattaaaaacttttgatttttggactaaaacatttgtaaataggtcatgttttcttaaacatattttatatagacatgacttctctattaaaaatcttagttataagcataggagatttctcagagaaccctgtgtttgagaatatagttgctgaagattatttactgtaatatataaaaagaggaaacaaactcacccacacagtcctcaggtgttggtgacagctcatgtcaccaaagggcttactaaatcaataagctctttacatctgaatatgacacaaaaacacaaattggggcacacaccatggccctgccctatgtgtgctctctggctcagggttggtccgtcgtggctgcctgtctctctggggtttgccagtccctcctgcacagagacaggggccctgccttcacatgctgcgacctggggtggcatgggctagtgtagtagaccagcactgtcttccagtcacacatgaggtttcattccatgggggcctggctgcctcatttaccacctgcctcattcagcccataccacagttgcagggttcatccttctgttaacatttctttctttttctttttcttttcttttttgagacaggttgtccctctgtcacccaggctggagtacagtggtgccatcatacatcgtaactccgtgcagccttgacctcttgggctcaagcaatcctcccacctcagcctccccaataattttttttttgtagagatggggtctccctacattgcccaggctggttgcaaactcctggtctcaagcagtcctgcctgggcttccccaagtgctgagattacaggcatgagtcaccatgccccccttttctgttacgatttctaagccacaaaaacaaatacacaattcagaatttttaaaggtgaaaaggcaccacttgcctgttggcatggcagttttggcagttggggaaaggaatgtgcctcaggtcccaggcccttctatctgggtctactgaaaacatacccttgtactgttagccagcaatttccccaacttttcaagcatgcagcaccttcgcttggaaggccaagtctatctcattcaatttttaaatttcttttaaaccctgtgaattagacatcgacgagtgcaggatttctcctgacctctgtggcagtggaatctgcgtcaatacaccgggcagctttgagtgcgagtgcttcgaaggctatgaaagtggcttcatgatgatgaagaactgcatgggtaagcaccgtgagctcttcctcgccagcttgaaaccatactagcacagactcattcgtgcgcatgacctttgcttatctctgggctgtgaacggcatgtgtggccagcatctgtggtgagagagagaagagatttaaatgtcagacaggaaatgcgctcctggatagctctcggggagccccaacctcttggcgccttcatggcaatgagatactcagattggatcctgtttattcatagaatctaaaatcacacagactgtttatttaggtgggactactttaaaatgcatggcatcgtgtggtggccccaagatttgtattcagtcatgccaatcccatgttattgctcttatttgtgtactattacaaactcttttggtattcccaaccttttagcccactgtttaattttcagtacgatataagacctacctcataggatatagtaggttataagtctaagattctccttcaccctgattagcgttatagacaccaggataactgacaacaatatatcatgagtccgtggtgatataaagcaaatattatgtatttctaccccttgtgagcctgctgatttcatgcaattaaatttcttgaaagcttactacctttaagagtagaaattttagtttttctgttggtcgtaggaaaagtgaggaaagcgttatcccatctcctatgaagcatctctcttccactaactcacactctcacatcagataatattctttctcccacgctgtatgtgtgaatatttttccctcagagttctttaatggatctcacgtttttacctttcagacattgacgaatgtgaacgtaaccctctcctttgtaggggtggcacctgtgtgaacactgagggcagctttcagtgtgactgcccactgggacacgagctgtcaccatcccgtgaggactgtgtgggtgagtttatctcctcagcacataaacctgcccagcacaactggtaaagaccagggatcagttctgacaaacctgttgtttgaggagcacatgaaatctagcttattaaaaggtggaaattgagattccctacatctggatgcaggctgtgtctttagtggatgcttgggtgacacactcgaataagctggcattcttctggttggcctctttttttataacaagccacgtgattggtccctgtgtgaggagccctgtggaagtccttgtggtctcatcctccattaggaaaaaatgggaaagctactgtgtgcgttgtgcacctttgcccagcgtcttcccatccactcggcagactccgctctacgcccctgtgcctgctcacgatcggcttgcacatgtgtgaacatggcgctcccttaacccacttctcatggaaacactgggtttcctcatttgccctgagctctgtagggctgccagaaaggatatgagaagactaatgactggtctttgggcgttgcaacctattgcttttcacaatacatgaagatctctggacttactatgttcctagtatactggctttaaaactttgttttagccagaaagcatgttcttcataggaactctttcttaaaaccgtaagcaaataagacagcctaaaatagaacagattgcacaccaaatttcaaaacataatttgagcacacctttccaatacacatatatttatttataagccttatgtattgctttgctagtatatgaggtgaattttgtcatagataaatagatattttaaaatgataaatgaaaaggtttttatgttcttatttcattttaatagctgtacaaaaggctttttcacactaataattgcagaatatttattcatggttgaacatattgaggtataatgagtcacagatctaagtttactttgttatttagttttcgtggatcttacagcttaaaaacgtatcccccaaaggaacaatgcagaatataaaatatatatttctgtataatatacacttagtgatcataagcataaacccatgccatataatcttcttggttattttgagaatttggaataaatttcttgttatatctgattatactgtactgttttttaccttaccttatacctgacaagtagtttacataaggaagtgtatcaccctgccattttcttctgttatcttgtgattacattattggtactagtttatttttaaggcacctgcccatattataggggttagtttatttttaaacaggcagtgtgatttgtagattactatcccgacacacaaaacataacacagtgtaaacaattaaatacatgagggccctattgtcatgcctctgtcttgtggaaccatcagtcttccatcagtatacttcaaatcatgtaggcaacacttcaccatctaatatagaccaggtgagcgtgccagtgtaagttcatatattaagtagtatttagcttcagttctggcatatgtgaaatctgtgtggtctaacatgatagtcactagccatatgtggctatgtaaattcagttaaaattaaataacattaaatattccttagttatactgtccatatttccagtactcagtagcacatgcagctgtgtattagaccgcatagatttgggagcagttgcatcattgtagaaagctttactcaacagtattgttgtagatggaaatagagaatccagcattttctttcaatcccccaggagaacattttacttcctcgtgaagtacacaaacccctttggagaccactgctctggtgaagcacctttctgatggctttagtgagtggacattgtgtaaagcattacttctgtgtatcttttatagatattaatgaatgctccctgagtgacaatctctgcagaaatggaaaatgtgtgaacatgattggaacctatcagtgctcttgcaatcctggatatcaggctacgccagaccgccagggctgtacaggtaaggggagaccaagcaggcctgaaactcatatgtctcaaatcagcctaggaaaacttttggcgctgaattataatgaaggctatgcaaatcctttgtcccaaaaatgaatgtaagactaggggcagatctcagttattgtgtgatcttgcagcagactcactcatcttaatgtagaaaatgctctaatccccatagttcttctatttctgagttaatcttagggtactgcacttaaacatggaatgctgcctaaaatgaaggtgaaagaactaagaaagataatgttcaatcaacacacatagtggggagaaaaattcaaagccacattagcattatctgtttaaaaagaagaaaactccttttaaggaagcagacctgacaatgtggttgcaatgctgttttcacagatattgatgaatgtatgataatgaacggaggctgtgacacccagtgcacaaattcagagggaagctacgaatgcagctgcagtgagggttatgccctgatgccagatgggagatcgtgtgcaggtatagaaaggaaaacacacaggttttgtacatctaactaattttttcttgaaaatatggctccagatattaccaagtggaaccagatagaaaacaaaaacatttgagattgatgaacgacatttttattttcatttgatgctaattttgtatcatcagacattgatgaatgtgaaaacaatcctgatatctgtgatggcggccagtgtaccaacattcctggagagtatcgctgcctctgctatgatggcttcatggcttccatggacatgaaaacatgcattggtgggtatcataagaaaggataaacatttatacacacacatgcacacacacccacatgcacacacaagcgtgataaaaggaaggctttttctgttgttattttaaaaattcaaatcattttactagaactgtaaaatctcaggaagaattacttttaaaaatgtctaaaggcaggttgtatatttatctataacacgatgatttgcggatggattatattttagatcttgcctgtgtatttcagtattatgctattcagtgtagaagatagcttttaaattactgtgatgagcacatactaagatattgaaaataaattttctagatgtcaatgaatgtgacctaaattcaaatatctgcatgtttggggaatgtgagaacacaaagggatccttcatttgccactgtcagctgggttactcagtgaagaaggggaccacaggatgtacaggtaggtttcaagcttgtgttctctgtatttcaacttctcagatgtcaaaggccaactttcaacatcatttgttctctggcatctcttagagcggttacctgccaccagactgtgactgtgtgtgtgatgagtgtgtgacctataggatgtgtgatggatttggctggtctctgtggtagcacgctgtctgagccacccaccgtggggctggctgtgggctgtgacagagtgagtgagtaggagtacagtctggttcccatggccctgaccacttatggtcgttcatgcagcatcagtcactttctgagtatgactgctgcccgcttggaagacattcatgtacaaagagcaccaaaagacccgaggatcccggttgccatttacctctgcacttcttttaaactagtaaaaattaatcaagtttcattgagactctttccctttcttcctttctcccatcttttcctttcttgtttgctcttctgtttgcttttgtcttctcttctctgtgcccaaattgcctttctctttttcctctcttcactttccttctttgctcactttgctcactttgtcttttgttccctttctctactactactactaactagttttagccttttgcatgcaggtggggctaggatgtgccggggtcaaggttttggatcacgtattcctcagtgcacaatttaagacttatgtgtgatattttttcaaggcaggtggtggaagacttaagagtccaacccagcccttaagctgacccctccagtaaggggcagattataaaagaaggtgttctttgcatgttcaccactgacagggttgatgtgaagccagtagtgtgtgtgtgtgtgtgtgtgtgtgtgtgtgtgtgtgtgatttcagcatctataatatgtaatcgttgaactagatagaacacattactatttatagtcaagaaagctttggagaaccaaatctacataggttatacatacatatatagggatatgtgtgtgtgtatacagacacacaaatacacacacacacacacgcacacacacacactggcgaaagcatctggctactttccagataacattcccagtgaatatttttctataatctcaaataagtagaagaaataaaaatatacacctaaatgaatagttttttttaaattctgtaaaatatttatattgattttttaaatgacaaatgatcatgtaattttaaagagaataaactattactttttttaaaaagttagattcttatcttcatgaaaaatatgtaataaatatcaataggaaggaatagcaccatctattattggaaataagatttctcttgatctgtaatcgaatgtcctctttatggtgttgtgtctgaatctgggcagggaagaaggccccaggataatacacatacctgccagggagcaacactgctgtgtctctctctcttctactggaaagtggctgaaagttgtttctagggaagaacttgttttattaggatcatgaattttccaagtcctcttggagcctacaaaaattaaaaataaaagttagttaggctactcttttctccatacggttgcatctttactttaaaatgttacctatacaaaaatatacttggaagtagaattaattagtttgtattttgattttcttcttatgaattatggtttatcagatgtggatgagtgtgaaattggtgctcataactgcgacatgcatgcctcatgtctgaatatcccaggaagcttcaagtgtagctgcagagaaggctggattggaaacggcatcaagtgtattggtgagtttgcaaatgtaaatatcctttgctaaggcacaaatttttaaaggctcttttttgcatggttgtagaatcatgctcttcacttttattaattcctttataaaaaggttatcttagttgcaagataattcctgcctaagggtgtcctttacccttaatataaattatcaaaatttcaacagtatgccttggcacctgttttttaatgtgtttttgttcagtaaaaattgatatgcagctggtgatccaaacacagctgtatgatgaaaaatgactagtatgttcttccaatcttttcaaagaagtaatcagtgagatttaaaatccagtggaataaatggagagcaatgaaaaggttttttcagataacctaattttttagtaagtcatcaataccaccatcttattagaaaatagaattcttcttacaggaaattgtaaatgctttcttgcattccaagaggtcttatttgaagaaaaaaaataggcaaattctccaagttttatggttcttgagccagagtctaagaagtcttttatatctgagagggaagggactagaatataccctgagtgtcattcacagttttgtgtaatatgcttagtgtttcacatgccttacaataaagcatttttccaactagtaagaatttctaggtcaatttaaaacagaaaagaaagcaagctaaactcacttccccctgataacttacaaaaaatatataggccctcagtaaggattaaagaatagctttaagatctcttaccaaaactataagttaatttgaatatatacttttttatccattcaaatatttcatacttatcaaaagtttatgtactgactatagaatttgaagtatcagagcttccaaataactgctaaataacatcctgcaatggcttagtgaagtgccagcctctagtccagccatctttccagggttactatcataacttttcaaccataccctcattcccattttcgtagccccatgtgcctactctttttctctttttggcctcccatttttatgcttcttgtccatctgtcattttggccaactattgcaaaacagcctgcctctgatacaagacattcagctgtgtccagcctcctgtgctccaggatgtcacccaaattcatcctctcctttacatcttctttcccctactctagtcccaaccagagagagtttctgtctctctcacatgccctcgctcttcgtgtctgctgaatgctaaaagaatcccctctggtatgttggcttgttccctctctggccctcctgcaatccattctccacgtagcagcaggaggaagcttttaaaccatggattcgatctcttcatagtcttcactataacccattgaattcgggataaaattcagcttccctcccttggctgcgggtttccactgtctctctagcttcattgtccatcaccctctgtctggtgcattctgctttgccactctaacctcctttcattttttcagtcacactgagctcttttcctccttggtgtcttaccatgcactcgtccctctgcaaggaatatccttccccacctctgttcagcaagttaattgtttctcatcctcaggtctgaccttaactaaaaactacttcctcaatgggggcatctttgttcctgcagcccaaatcagatgccttttttattctctcatggcaccttgtaacttttcttcatggcacatatagcaagatttagtttttttctgtgtttaacatctgtcttttctgctcaactaagggattccatgaggtcaagaatcatatctctgtttcctcatctattaaataaacttaaaaactctttgttaattttcctgctctgaaattcagtatcaccttcagaattgattcttctactgataaggaaaccactaataaaattcaccctcagtagaagtcagaatgagatctaacactaatttgctttaagctgttaaaaaattcacgttgactagatatctcacaaattgcttgaattcataattttggcccacatttatagcctggacattggacattgggtctgagagcttagcgaattagaactgtgatcctgcaaactaaaatgcctgtcatttatccagtttatatgtaaattaagacaaacgataatctttccaggtgcttaaatgttccattttcatttctgaactttattgctgtgttctgcagatctggacgaatgttctaatggaacccaccagtgtagcatcaatgctcagtgtgtaaataccccgggctcataccgctgtgcctgctccgaaggtttcactggtgatggctttacctgctcaggtgggtgacagtcctgaggtgtgctctgacgggatggtcatagaacactctatatgcttccttatttgaagaaaattataattaaaggagacaaaagtaactacctctttttttatacttgacttgcaggtgactatgtatctttctcttacattaaacacaaaaacctgaatgactttccaaatatattgttggaagttttcaaataacggcatttgtaacaatcatgtactgttaatgactcgccattttatcttactcatttgtaacacagtggttaaaaaaacacaggctttgtctggatcagactacctggattcaaatcttgcctatgccattttttgcctgtaactgtaagtgaattacttaacttgtctgtcctgatttaaaatgcaatagtaataatacaattttcttttcttcttttttattcctaaatgaatggcatgggaaaactgttcagctttttaagataggatatatgacctatccaatcactgctatttaatgtgtttatcaaagtctcagtagtttatcacctggcattgaaaggattaaatggaataatacaaataaaggacttagaagaacacatcacaaaatttcagtaaataatagcttctgtttggcttctattcattcatactctttgaggataaagcatcctctcattatatgcatgtataagactagataatcttgctggacgtaaagttgaatactcttcagtttataaaataagggtttctcaattgattttcagtacacactttaaacccataattaacggatagcctaaatttttttcaaattgtggacatcaaaaatgcagcctcatcattttcaaatgcctgtttaaggaaacatgtttattcagttttaaagcttcataacttgtagccttagagtttgcatctttcctggcatttctccgcactgtggtgtcaaggaaagagcatggctttcatgtcagacacatctgcaatcagatcctggctcagtcaacatgcattattagctcagtgtggctgtgtcagcttacttggctgctcttagccacaggttcttcctcttctaaacctcaggagattggtgaattcagtgaaaaaatgcatgtcaggccaccagcacagcatatggcaaatgacaccctcactaaacagtgatttttccttccctcttattctgcttgatagaattaaattatctttaaggtctgtgagtaatgtctgtttgtgtaattaagataggagtatttttataagattgtaatgacatgaaagaaactttccccattcccatagtgtctttaatttgctttaaaacacttgaattagtgaaaaagccagttatttattcgaatactataattttctcaaagaatgatcaccattttaagattaattccaatgttctttttcatatctaaataatgttggcatactactgacaagagaaacaagacaaatgtgagagatgtctgcgtttctcctattaataatattacaattggatgttagggtgcaggttaaatagcttttctttaattatattacaattgaatgttagggggcaagataaatagattttctctcaggttgataccctcctttaagtgaatgtgattaactgttgtttcatgttaatgagcattaagtcaagccagtaaaactgatctatttatagagcaaggagaaaatgtgtcatgaaatttggaacttaacagagatgtaatttgcttttttgcacagatgttgatgagtgtgcagaaaacataaacctctgtgagaacggacagtgccttaatgtcccgggtgcatatcgctgcgagtgtgagatgggcttcactccagcctcagacagcagatcctgccaaggtgggtcaccaggattccaactcattttcaagttggatcaaccacagtaaatgaaaccacaacaagggctggaacaagctccacctggaagcagaatacatagcacatgctgcactataaaagtcattcgtttaagcgtggattattttgccgaatgaataatgatgatggcggctttcatctcttatgaagttttcctggccaagagccagtagttggaagtttggatcattcttttttcttttttaaccatttcttctcttctttctcttttttatcactaaatgaatgacatgtggagaaactattcagcttttaaagtatgctccattacttgtctcaactaccactatttattgtgtttatcaaaatcataaaaagctcatttttggcatttaccttcgtggttgagactgctgtctgtatgtctgggaatggaagtcctcttcagggattcagcaagggctgtacttttgcttaatactagtggttccttattctaagtgatgacatcatccacctttcctagaaatgggtctttgtgcctagtatgatatctttccaagaaaaagaatttggattttctattaaattagaaactcaattcacattatatatagtttgagccatcattgtgttatgaatagggactatatgaaaatataaatgaagaaaggagagattgaaaataatttatacaccatagggcttcagtagaatttatgattcacagaaaacctttaaaaaaactcagtttgggccaggcgtggtggctcacgcctatattcccagctctttgggaggccgaggcaggtggatcacctgaggttgggagttcaagaccagcctgaacaacatggagaaactccatctctactaaaaatacaaaattagctgggtatggtggctcatgcctgtaatcccagctactcaggaggcagaggcaggaaaattgcttgaaccctggaggcggaggttgcggtgagccaagattgcgccattgcactacagactggacaacaagagcgaaactcagtctaaaaaaaaaaacaaaaacaaaaacaaacaaaccaacaaaagaactcagttttccagtcatgcagcctcatgaaaaaaaaaaaaatacctaactgctgagcaaaaatgataaaatgaaacatattaaaaacttccccctacatcagtatctaaccagaatgaacagaattggcaagtactggcacacgtgcacacacacatatacacacacaaacacacaattcatcagcatcaaccaaacaaaaccaaattatacaacctgcggtggttcagagtggagcccaactctgctccaccatcagaagtggcactgaagaaagaaagtgtgccaaaagttcatgaaattctccagaaatagcaaccaatttggagagactcagaaaaaggggatgaacagttggccgtagggaagatgaagttggaaactgaaagcgttcgtgcttctacgttgacccacaagattgggcagaatctaatccattttatataaggcaactgtagggtgagttcctttttttcccaatcctggtttcttctaagcactgaagcttagtagtagaattagtagaaaatgtgaatcaatgtaaatgtggaatgacatgatttattatctacattagcttgacaagagttagtgggagaaggaacaggtcagcagtagccactttcaacaacataaattctttatacccagacaggatttttccttcctaattgtgtattactttatgggtggcataggccctttcagaacttccctctcccccaagatggtgctaaatagttactgtttactgtacttccttcacatctagttttctcatatgtcattaccacagagagaaactcctaactgacagggaagctgagggttggcacacctgtagttcaccctcagttggaccctctgctccattcagctgaacaccagcttttgagatccaaaaaatgtaattccatggttctggccattctccttgtttttctctcctctccacaaggtctgggtcatctggacagtttctcctgaatttactattttaatcccttgttgtctacccatcttattataaatacatgatcctccgatgaatattttccactaagcatccacttctcaccaaagtctcagaatttctatagaattcaaaaaattattgaagttggccatttcccagtaaattccaccaaaatgggggaatataaaacctggaggagcccctgcaggaacatgagagaggactccattaaatggaacagacctacatacagaccattttctataatttctgaggagagagcaaaggctaagttcatcaacatagagcccagaggagctctccccattctcaatcttctctccctccaccttacgaaactttgggcgactgaatacagctttaatgaaaccgaaaccagctatcttccacataaagctctgataaagaaggaaagatatcaagagatgttatttaaactgtactaaagtagatagaagctcttgaaagagcagacaaagtagtgtctatacaagctgaaaaacagtagcaactatgcaggcattctgtgaaaacgaaaggaagaaaaacacaaaatcagctaaagaaccaacccacgatggaagaaaacaactcaagaaataaaacaaattttccataggtactttatgccatatatgatcttaataaaatcataaatgtagttgaagaagtttgtagagattataagagctatagagtaaaagggagattgtagaatcaagggaagtaagaaatggggaccaatacagcaaaataagaggactattaaataaaaacagcaaaaaacagaggacatacagatgaaaatgtaattgctagcatagagaaagggcctgagataataacagtggaaagaggaaagagaaattaacactattagagaaaagacaaaaactataaacatcagtataattggtgttgctgaagagagcccaaaaaatcaactagaaaaaaggtactaaacaaccaaacattttcctgcaataaaacaaagaactgaatatacaaagcctaaattgtaagacaaagacttagatttgctacatttgtcaactttaatcatagaggaggattgaagacttcagatagaaaaggcaacgcatctcacgtgcaaagacacacataggcttaaaataaagggatggaggaatatttaccaagcaaatggaaagcaaaataaaaagcagagattgcaatcttagtctctgataagacagactttaagccaacagagatcaaaagagacaaagaagggcattacataatggtaaagggatcaatgcaacaagaaaagctaactgtcctaaatatatatgcacccaatacaggagtacccagattcataaagcaagttcttagagacctacaaagagacttagactcccacacaataatagtgggagactttaacaccccactgtcaatattagacagatcaacgagacagaaaataaaggatattcaggatctgaactcagctcaggaccaagtggacctaatagagatctacagaactctccaccccaaatcaacaaaatatacattcttctcagcaccacatagcacttattctaaaattgaccacatgattgaaagtaaaacactcctcagcaaatgcaaaagaatggaaataataacaaacagtctctccgaccacagtgcaaccaaattagaactcagggttaagaaactcactcatggccgagcgcagtggctcatgcctgtaatcctaacactttgggaggccaaggccggtggatcatgaggtcaggtgatcaagatcatactggctaacatggcaaaaccccatctctactaaaaatacaaaaaaagttagccgggcatgatgccgggcacctgtagtcgtagctactcaggaggctgaagcaggagaatggcgtgaacccgggaggcagagcttgcagtgagccgagatcacgccactgcactccagcctgggtcaacagagcgagactccatctcaaaaaaaaaaaaaaagaaaaagaaaacaaactcactcaaaactgcacaactatatggaaactgaacaacctgttcctgaatgactactgggtaaataacaaaattaaggcaggaatacagaagttctttgaaaccaatgagaacaaagtcacaacatgccagaatctctgggacacagctaaagcagtgtttagacagaaatttatagcagtaaatgcccacaggagaaagcaagaaagatctaaaatcaacacgctaacatcacaattaaaagaactcgagaagcaagaacaaacaaattcagtagctagcagaagacaagaaataactaagagcagaactgaaggagacagggacacaataaaccctttaaagaaaatcaatgaatccaggagctggttttctgaaaagattaacaaaacagatagactgctagtgagacaaataagaagacagagaagaatcaaatagacacaataaaaaatgataaagggggggatatcaccactgatcacacagaaatataaactaccatcagagaatactataaacacctctctgcaaataaactagaagatctagaagaaatggataaattcctggacacatacaccctaccaagactaaaccaggaagaagttgaatcccttaatagaccaataacaagttctgaaattgagccagtaattaatagcctaccaaacaaaataagtccaggaacaggtagattgacagccatattcatccagaggtacaaataggagctggtaccattccttctgaaactattccaaacaacagaaagagggactcctccctaactcattttatgaggccagcatcatcctgataccgaaacttggaagagacacaacaaaaaaataaaatttcaagccaatatccccgatgaacattgatgcaaagattctcaataaaatactggcaaaccgaatccagcagcacatcaaagagcttatccaccacgatcaagtcggctttatccctgggatgcaaggccggttcaacatatgcaaatcagtaaatgtaatccatcacataaacagaaccaatgacaaaaactgcatgattatctcaaaagatgcagtaaggccttcgataaaactaggcctttgataaaataggcccttcaataaaattcaacaccccttcatgctaaaaactctcaataaacttgatatagatggaatgtatctcaaaataataggagctatttatgacaaacccacagccaatatcatactgaatgggcaaaggctggaagcattccctttgaaaactggcacaagacaaggatgccctctctcaccactcctattcaacatagtattgaaagttctggccagggcaatcaggcaagagaaagaaataaagggtattcaaataggaaaagaggaagtcaaattgtatctgtttgcagatgacatgattgtatatttagaaaaccgcatcatctcggcccaaaatctcctaaagctgataagcaatttcagcagtctcaggatacaaaatcggtgtgcaaaaatcacaagcattcctatacaccaataatagccaaatcatgagtgaactcccattcacaattgctacaaagagaataaaatacataggaatacaacttacaagggatgtgaagggcctcttaaaggagaaccactaaccactgctcaaggaaataagagaggacgcaaacaaatggaaaaacattccatgctcatggataggaaaaatcagtatcatgaaaatggcccaactgcccaaagtaatttatagattcaatggtatccccatcaagctaccattgactttcttcacagaattaggaaaaactaccttaaattatggaaccaaaaaagagccagataatcctaagcaaaaagaacaaagctggaggcatcacaccacctgacttcaaactatcctacaaggccacagtaaccataacagcatggtactggtaccaaaacagagatacagaccaatggaacagaacagagccctcagaaataataccacacatctacaaccatctgatctttgacaaacctgaaaaaaacaagcaatggggagaggattccctatttaataaatggtgctgggaaaactggctagccatatgcagaaaactgaaactgcacccctttctttccccttatacgaaagttaactcaagtggattaaagacttaaacataagacctaaaaccataaaaaacgccagaagaaaacctaggcaataccactgaagacataggcatgggcaaagacttcatgactgaaacaccaaaagcaatggcaacaaaagccaaaattgacaagtgggatctaattaaactaaagagcttgtgcacagcaaaagaaactatcatcagagtgaacaggcaacctacagaatggaagaaaatttttgtaatctatctatcggacaaagggctaatatccagaatctgcaaggaacttaaatttacaagaaaaaaaacaaccccataaaaaagtgagcaatggatatgaacagacaattttcaaaagaaaacatttatgaggccaacaaacgtgaaaaaaagcacatcctcactggtcattagagaaatgcaaatcaaaaccacaatgagatatcatctcatgccagttagaatgacgatcattaaaaagtcaggaaacaacagatgctggagagcatgtggagaaatgggaacacttttacactattggtgggagtataaattagttcaaccattgtggaggacagtgtggcgattcctccaggatccagaaccagaaataccatttgacccagcaatcccattactgaggatatacccaaaggattataaatcattctgctataaagacacatgcacacatatgtttattgcagcactgttcataatagcaaagacctggaaccaacccaaatgaccatcaatgatagactggataaagaaaatgtggcacatatacaccatggaatactatgcaaccataaaaaaggatgagttcatgtcctttgcagggacgtggatgaagctggaaaccatcattctcagcaaactaagacaggaacagaaaaccgaacactgcatgttctcactcataggtgggagttgaacagtgagaacacgtggacagggagggaaacatcacacactggggcctgtcggagggtgaggggctaggggagggatagcattaggagaaatacctaatgtagatgacaggttgatggatgcagcaaaccaccatggcacacatatacctatgtaacaaacctgcacattctgtacatgtatcccagaacttaagtataatttttaaaaaatgcaattcatgagctaaacagaaatattcaatatcaaaagacattagatccatgcccacagaattctgaggaaatgtgaaaaatattatacttaatattaattgtaaagataataagcattttcttacacatgaaataagtcaggtagaaaacacctgtgatttcataaaagtcccacccttcttggagaaagaacaatcagcaatgaaacacagccaatcaagaaacaaatggagaagttgtcataaaaccattattgatccctttaagtaaataattagtactaaacactgtggaaattatggtaaactgccatagacattaaaaaagtgaacataattaaataaaaataaggagttggaaggatacatgagtgctaattttcttataatttattgtatagaattcattaatactgtctaaaaattacatttcaactttagcataaagccaaaaaatttttagcgttttttattcttaacattagaaaagtattttaaaactgttgagatgatggtaaatttatctgatgcatacaaattgttttagcttcactgtctaaatatgtatataaaaatgtctcatcatcttaaatgattctttctagatagaaacatttttgagtaattgttttgctgttttgttttctgtattatttgaatttttgaatatttatcacttttataaaggaaagacagtaatcttttaaaatgcgttcttttatacaacaattacattatttaggtggaagaaatttctaataaagttcatttaaaagtaaaatggatcgggcatggtggcccgcacctattaatacagtgctttggaaggccaaggagggaggatcccatgagcccaggagttcaagaccaacctaggccacatagggagaccctgtctctgcaaacctttttaaattagctaggtgtgatggtgtttgcccatagtcccagctacctggaaggctgaagggggaggattgcttgagcccaggagattgtggctgcagtgagccatgatcgtgctactactccagcctgtgtgacagagcaagaacctgtctgaaaaaaaaaaaaatgcatagtcagaaggataataatacaattccctttttgagtataaattaacacaattcaattgtaatctagcttaaagagtttttactcatttatataaagagaataactttcttacccccaacacaataaaagacacctttgcacatgttaaactttaaacatgattggaaccataccttaaatctaaaatagttgaaaccaatattttaactgggaagaatgaccaaagaagtcttgtttagacttaagatataactgtctgaggacagcagtttagaatgatttgtctagtctagcctaaaatgacgtgcctggtctgcattctcagagtgttaggcaatttatatacataaatatccatcctctttttgagagtagaaattcagattatttccacagctatacatacacattgattttcacctgagtgaggagtgataacttcatatttactaactttgagttaaagcctcatggaagactctcataaacttttcataaatgaatttttagtccaattcagtagagatattttaatgaaatttactagaatgtggggtcaatggatcatcttattaacatgaaattagggaagaaattagttctctgtttaaaactgctttataataacagataagattacaaaataaaaaggaagtaaaaactaaaaagttaatatttatttaattaactaaatttatttaattaactaaattaactaaatttatttaattaactaaattaactaaaaagttaattttaatatctccaatatttaaaaatgattatgtatttgttttttcataatataaaacatttattaactataaaatgtctgctgtttgcactaattagttagaatctttgaatttgcttttatctttttttcacaatttcatttctttgacatgtttatatttaatttttgtattttgtgtgccttgagccaactcttctttaagtatatcataatccaagtcattcaaaatactagacactcattttacgaagaaaacagtattcttgtatatcttagttccataggtgaacattagttgcttgccctttacacttatctacctagccaaaaaagagaaaaaaaaagccttactgaataaaaacatctgagggggcagaaaaatgcgctaatgttagacattacattaaaattttaaaatgtcttcttaaataagagattacttttttttaaaatcttcagatattgatgaatgctccttccaaaacatttgtgtctttggaacatgtaataacctgcctggaatgtttcattgcatctgcgatgatggttatgaattggacagaacaggagggaactgtacaggtatggtcagttaccagctaagttgtgttctgattcattgaaatgagtattctgtgctaagcataaaaattcctgagatttctgcttagctaatctatgcattaggttacacatttttcagaaaaagaaaattatattcagatgcatttatttgtaactatggaattgatgcatttttatgtaaataatattaaattgttatctgtatgattgttaaatatctgacatgaaactagtaaagtgtctctttatatatatgttcatgtatatgtatatatagtacatgtatatatatatatacatgtatatatgtgatttttgttaagcaaatagtgacataattttttcgtcctcagagttgcaaattttaattaattacaatgtatttgttaaggatgttaaacgctgtcataaatactctgtccttgatgtatggaacctgttttaggtatataccaaaatttaagatatttattttattgtgttgagtctttcctagtgatctttaatctactcacttgcaaaaattccaccaaattctttggaacagcagtatgcacagaaaaagtaaaaatggtaacctgggcattttaaatgcttctcctagatattgatgagtgtgcagatcctataaactgtgtcaatggcctatgtgtcaacacgcctggtcgctatgagtgtaactgcccacccgattttcagttgaacccaactggtgtgggttgtgttggtaagtaaagctatatgaaacaaacaaatagaattatcaagttgaatattcagactctcttgataatgaaccgtgatgagtgtttgctacagttaacttaaaaacaaaacattatgtggtcgcctttattgtgtttctcttccaaatcatctgctccaccttcctcctctcacggacttgagaaccaaggcacagagaagtgcagtaatttgttcaaggtctcagagcttgaaagtggcagagctaaggcagtggcccaggttgccacctggctccttgtccagcgtttggccaggataacccagagtggtggtatagctgttagaatatctatttctcctgcctactggaagggtcatatagcaaagtaaatgaagtgatgagaagcaaggaattagagagatggatttatgagccaaaccattggagcagaagaagttggaaggtgacagggaggaggaggaggccgtaatgaaggttcagaatctgtggtcagcacctctgatcttaaaaaaacaattgtccagcttttactatctgcactgttactgtattttcctagagaaggaaatggcctggagaattttctggaagtatacaaaaaaagggaggggtggagaattccttgcttgagtagaaatctgcctactgtcctcagtgtcagtttttgggcctgcagcaaatggaaggaatatttgctgctgtgatttatacacaacttatatactgttttcaagttttggagaatacttttaattatcatttacacaaactccaagtctgtgttttccattcaaaataattcatttggtaaagtttgagtgccttctgtctaagggctggagttgcaacagtgaacagaacaagcacattctctgcttttgtgtttacattctagaggcagggagataaataaaagcaagaacaaacagaattggcactggaggtggttggaggagaagcgctatgttatattagggatgggggagtcacagcctttaaggaggggacagaccaactggaccactgagggaagcctccagttacaaggagaagccagtgcaaggggcatgtggcaggagaaggctggcgttagagacacagcacaaggctgcttgtagcaagagaggagtgagtggaggggacagggatgaggagaggaatcagaggagcagtcgcccagttcgcaaagtgattctcaacccaggctgcatagtaaactccatttagaacctggaaaagatattgatgcctgttacaccctcagaaattctgactcactggggcctcaatatttcttaaaaacctccttggaacaaaggctgtgaacaggcagctcataaaagagaatagtctaaacattaaaaaatgtaagcaaacaaatgcccaaaatcattaggaataagaaatccatttgaaacaattatatgaatgccactttacacttcatatactggcaaaaattaggaaacctggataatgtgaagtattggtggggacatgagccttgaggagcattctgttctgctggtagaagtgtagaccagggcagcactgcagataatatgtttgcacaatggtacaccgattaactgtcaatgtataatcaattttagtttatgagtttctttttgaagcaattcgatttgtatggattgacactttattgcgttcactcattcttagtgccaaaaaaacaaggacttattctatctcaaaagtgccataggaatctattggaacctttcgtaggtctgaaacattataaaatattaagagatcttgtttttcctttgtcttgaaacattttgacgttttatcatcctagctgttatttttgtcaatgttcaacattatgtccaatggatacaacagagtaaaataacgagaagtggaaaattatggcatcacctagaagtaacatgcattagtgaaataaaatgtcactgttttatcatccttcagttttcttattatattgtcctaaggattgcatcatttttcaagaaagtgcaagagaagactggagacaccttacttgaaatcttcttttagcatttattgaacacagttgagaatttagaagtttttacttactggccataatttttggcaaagagaaaaaaatgaagttgagtcaggtaactacaaagagacagagagcagctcttttgtctagattctaaaggtgatggtgaagtgaatcatctaagcacaatcccagactacgtgtcttcagagaccaatatcctaggtgaatgttttcaaacttcagaatcagcaagtgaaaggacagtgtatttccgtagacaaaggaaatacagtattctcatccacttagtcaatagaaagaacttcaacccgcaatatttggtaacaagaacctgaaccatcccaggtttgtggattctttcatattttcatgacgtttctgtaccaaaatttaattgatatgattcataagcagacagagataaaggcaggtatgtataaaaggttactggaaggaaatatgtgatgtagaaatacagtcattagattgattgttctaattggtgttgataaatctaaaaatgaaaacattttctatttgtggagactttaaagaagacggctgtcctctcatcaacaaaatcatgaactgttaatgttttcaaacattcctttgggtattgcatttttatgaagcaagaacaagaagaaccagaaataatgataagctagaacctattagagatgtgtttgaaacctggaatcggtttttacaaactggatatattccaagttcatgaatgacagttgataagcaattagttgcattcagaagatcattttgagtagaatatcttcaaaaccaagaaaatatagattaaaaaattgagttagctatcattaaattgttattaatattgctaataaagttgttttcaacttttttcttctgtatattagttttataatatacctttcttctgtaaattattttttaaaatgacttaaaaatattaaaaattaaagggttccttggatgtagttggtaaatgatgactatttttcctgactgaaggctaagtataggcaaatcctgtgaatcaacaattccttttgtggctgtatatgccaatggaattaactcacaggcccatacagagacacatatatgatgttcatcacggcattctttgtggtggcaggattttagaaaccatttttggagaggagggtttttttttaaaagcaattatacaccacggagttgacagactggaggtttacagaacaagcatgactagaaaagttataaaaatgaaatgagatgtatgacaaaagacatttgtgtacatttaaaatgaacacattaaaacaaaaatatttattttgcaagagcacatgtaaaaagtaatagcattaaatacatttggatgatctggtagggaaggagaataggaatgaagaataggaataaaagagaaagggagggggaagagagagaaagaacaggtgaataaatgaggaataaataaacctaattaggctgggcgtggtggctcacgcctgttactccagcactttgggaggctgaggtgggtggatcacaaggtcaaaagatcaagaccatcctggccaacatggtgaaaccccgtctctactaaaaatacaaaaattaactgcgcgtggtggcaggcacctgtagtcccagctactcgggaggctgaggcaggagaatcacttgaggcagaggttgcagtgggccgagatagtgccactgtactccagcttggcaacagaggaagactccgtccccaaaaaataaataaacaaataaatataaataaacctaattagaagggggaccatgagaatcttgcagcctctgagatctgagattcagcaacaaaaacaaaatgcaaaatctgagacaaaaataaagtaaaataagtttttttaaaaagcccaaatgattctaatatgcagccagggatgaaaattactttgtagactgctaagaactctagattttattctgattgagaagagaagccattggaggttgcctgacctaaggtaatgctattgaagggtcactctggcttacagaaggtaaagtagaccatagtttagtcaaggatggaagttgagaaaagagttagaaaactattacattagactaggtaaagggataatgatggtggctggaactcagttggtagtgattaaaaaaaaaagatagtaatgatagaggcagtggtaagtagacagattccagatatgttttttttttttttttttttttttgagacagagtctcgctctgttgcccaggctggagtgcagtggcgtgatctcggctcactgcaagccctgcctcccaggttcatgccattctcctgcctcagccaccctagtagctgggactacaggtgcccgccaccatgctcagctaattttctgtatttttagtagagacgggttttcaccatgttagccaggatggtcgattccagatatgttttgaaggttgagtagacagcccttattactggattgaataaggaatcatagtaaggagtcaaaaatgatgtcaaagcttagggcctgtgcaactgaaaaaaaaagtgaatttccttttattgaaaatgcagaagactgggagagaagacggcagattttgtacatggaggaaagagcattgacagtttgattttagatgtgttaactttgaaataattattagatgtttaagagaagaaatgaaataggcaattggtagaagggtctagagttcacgggagagatgagatacagaaccataaatttgagagttctcagcaaaaaagtagtatttaaacccatagactcaatggagtgatctggatgataactgtagagataaagaaaagccttagattagttgatcccttaaatatcttctctaagtttgttgcaggctatcttttccaaaacctgcaaagttagctatgcaagttgaaactaaaccattggataaactcgtgatatagattaattatacaaaaaatgtattgtattcctattattggaggtccagtatgtcccaaatgagaaatttcttactatcttgtccattccatgagtataggaaaatatggtctatgtggatttctaaatataggaaagtctgccatgattggcttcctctgactcaatctcgaaaaagctgaaaagcaggagattgcttggtacttaaggattaaaaggaacctttcatgttaacgtacaaaatttgaatttcatcctttgagtgacttttccctaaaatggagtccttactatgtaagcaagggcaactgtaagctcctttgttgctctgcagacaaccgtgtgggcaactgctacctgaagtttggacctcgaggagatgggagtctgtcttgcaacaccgagatcggggtgggcgtcagtcgctcttcatgctgctgctctctgggaaaggcctggggaaacccctgtgagacatgcccccctgtcaatagcagtaagtacaaagctgaagaagaggaagaaaaccaactggtatctaaagatttgttgccattttattcctgagctgggagtgaggagtgtttagtgaggacaaaacaaaaaaactgaatttgaactactttcagtgatcactctgaaaccagccaagaatgttaaaggatttgaattcctctcttcctatgttttatcatgatatgttaaaaaaataatttttaactgtaatcatgtatgaatagtactaatatcagttcttcatgatgtcacagataaagtgcattcctgattcttctcaaaggttatttagttcagcttcataggtgtgttgtattcttgaagtcaattatagaatgccttaaattgaaacatctgatatgaacatgaaccaaagcctgttttctctagtcttaatttactagctaaaagagctgcaagggaattttttctttaattaaaaacaaatggttcgtgttattctactgtgtatgtgattaataaagtatgatcttttatgtaaaatatgtaactttaaatgtatttgaaagggcactaagaaaaatttggatacaccccttaggatgagtatattgagcctgtcatttgctgaatgcttgctcattgtctcagccacttggacacaggtatcaaacctcttatttttctattgttttgtagctgaatattacaccctgtgtcccggaggtgaaggcttcagacctaaccccatcacaatcattttagaaggtgagctaatcccattgtcacccagattcaaacaaggtaaagagttaattatagagaaaagctggcagaaaacctagggcagagcagccccgacaagataatttagtaaaattacagatggactttaattactaaaatgttaaactactacttttatcaagcagtaatgatccattgcagtgatttgacgtctgactgttctgcagagaaactctttcccattgtcctctaccttgaataatctccaacttaactttattcattttctcagataatggtaaaagttctgtgacaaagccaagaagatatttgagcagaataaacttgccatctaagtgtgcgttcatttggatgcatagaaatctgattcttacaagatcacacttttgaaagctctaatattaactcttatccttagtgaaggtgtttgttttaagtgcactgtctccctttttgtagacattgacgaatgccaggagttaccaggtctctgccagggtggaaactgcatcaacacttttgggagcttccagtgtgagtgcccacaaggctactacctcagcgaggatacccgcatctgtgaaggtgagatgaatttgatgcctaaaatgctcagtgctgtttaaaacaaaatggctgctgaggcctgagggaaaggcccatcctcacattctacaaaaggctcaattaagattggttcatagcttttttttttttcatatcaatgtagctaagttgtatgatgatagacaaattaatttatggctcgttgccataattcactgtatttttccaggagggttgattaaatataaattgggaaaatggggtagtgtgaaaacctaaaatattaagtaagttattagtgaaaatattgataagaattacattttacataggaaaaattggtaagctaaaatgtgaccattaacttaatattgatcagtaatttttaaatgttggactatatggtatgaagaagttcaaaggttatgcagctgccattcttgcttccatccccccactttatcacatggtatttcaattcttttaggggcctgtctcaccactaaactgggggcttctggagacaaggtccacatcttactcatcattacagccataagttctagcttacagtagaatctcaatattttaattgtgaaatgagtgaatgcttctaactgaacattaaacatgtagcgtaattatttccattataacttttcttttggaacatgtttgataaatgtatctggaagaaataggatgtaatgaggagaacaaccagcagctgcactgctttaagaatctctgaatagttactaatttgaaagaagctacaaagacaaaggctttcccaacctgcattcactttaaagttggcattaaaacttagcctaagtgacataggacaaaagcaggctttaaagaaattccaattgaagaatgcgaattgcaataaaaaaaaaaaaaatatatatatatatatatatatgtgccaaggaaattattttttgccactttagaataatttcttttgatgctttatattttttaatatggggatttttttcttttgaagaaagatgtatctgtgttatataaatgcatatttgggatattttctttatttctaagttttgcataaatggggatttagagaatcacctatgctttgttcagtcatctaagtaatataaattcattgaaaaaatagatttattaattaatagatattcttgcctactctagatattgatgagtgttttgcacatcctggtgtgtgtgggcctgggacctgctataacaccctgggaaattacacctgcatttgcccacctgagtacatgcaggtcaatggaggccacaactgcatgggtaggtaaagaactctgagattaattagagcacagttgttgacttcacacataaagcacttacgtctcagaattattgtttggaagtttggaagttcagtcttcgtgaattgagatatttcagagtcttgcaagctgctggcttagtatcaagtttttgacctttgggtatacatttaaatttttaaaagcatgagtctaatgtagaaaatttcctcaaatgttatatattcttaaatttttcatctccattcatatagtgtgaacattaatttacaaataaaagaacatttaaattttaatgctttatttttttaattaaataaatgattttgagagaaaaacaaatatgtattaacattgtctcccaagaaaattataagtgaaatcctttaaggataaaggagagatgttaatctaaaaatgatttatgtttaaggagttattttaagatagcttcaaatgactaaaaagggtttccgagttgtgttcatcaggaaagcttgatgtctacagctgtgtgggcttcattataaactactcgtggatacaaatggctagtttctttgtttttctttatatagacatgagaaaaagcttttgctaccgaagctataatggaaccacttgtgagaatgagttgcctttcaatgtgacaaaaaggatgtgctgctgcacatataatgtgggcaaagcctggaacaaaccttgtgaaccatgcccaactccaggaacaggtaagcacacggctcgtgcatctgctgactgccacatcagtgatacacgcatatatctaacagtatagtcaaagtcactgcatgctaaaactagagatgctcagttccaaaaattcccaagagcatcatatggttctgtttcccaagtgatcctctttgggattcaaacactaacttctgagacattatgttggataggcttgtgaatcctgaaaataagatccattgctgaagagttagagttgatagcattagtccatttaaactcattatcttaaactgtgcttgtcaattattgatttattcatcaaacaaatatttcttgagtaactactgtatgtcactgtgctagacatggaaagtataatatttggagaaaaactaaattcaataaggatttttttttagttcagccgtggaaaatatgcaaaaagtgttttttatgagcgaattttacataaaagcaacccattgtcataatgtgccttttacatcttcttcctcagacatcagtgaaatttttaggcaaaaaatagagcttgtcttcacttggtcatgtttttttcacaagacagtttcttttgaaagaaaaaatgaaagataatagagataagagcaaaaatgcttgtcttaaaattgctgtccatcaggctctcttttatgacctggagaatggcaacttttaataactatagatactaagagttgaaccagtaggccaaataagaaacagtgattatgcatttgttaccaaatattacttagggtatatgtatttaaatgttccatttaatgtattgatgaaattaaggagagaaatgatgaaaagcaacacataggcctttttcagtggctccaattcactggtcaaatggattttcttagccttatcttgccattattatgttccataaaattaaatagaaacattcctacaattctcaactttaaaactccatagttacaaatttaagatcattgatttggggaattaaaatggcactttctttgtgagaagaagcgaaaggcttggagttgagagacgtgtctgtatttaaatcaaaactcttaagatacttattgtggaacctcctgcagagtatgtatcctttctgaaactaatttctcatgtataaaataggaataataaataattacagtgactaattcatatgggtgcaatgacaattagggagattatacatataaattataatttgcagatttccagacaattagaaaccattaagttgagcatctgtggtctttctatctgttctcaatactcggtatatattgatggatgaaatatacaatatccctgacctgatagcacttggaatatagtatgcagtttaagttttatataatactgttttcaggagttttactcacttgtatagcagtgagcgtcagaagcatttttcatcttgcaaattagaattcttttaaatttccattgatttggttaattatgtgtaagaatacctcttatagtccctattttatttcataatgcattgtttttgatgactcaaatttcacattccaatagacacagtaaaaaaaaaaaagacaaaattcgcatctcattcattatacattgtttacctatttcccctctacaacattatttttgcatgtctatacctttgtgcaatctgtaattcctttttcaatttgtacttctctttttttttaatctttatgtattggatgttttttaaagctctgcatattaaaagaaaaagtatttaaatatctaaatggacattttgaatcttataatgatttacttgccttctgatatcagagcagtaaaaagttaatgagagtaatagaaataacaatgataataatggtaaagaatgcctagatccactcctagcagaagctggcattgctatcaaataaatataattgaaatcaaaatgtctggttgtgaataatgtaaaatatatttgtttgtgaaagtaatacaaaatgttattttgaaggaatttgagaaatttaagagtgcattgctttgtttatattttaaagctgactttaaaaccatatgtggaaatattcctggattcacctttgacattcacacaggaaaagctgttggtgagtttttccagattatgtttgttttaatacatatgtgtagcattctgtaaaaatctattctatgtttttaaaattcaagagtaccacaaaatataataatctgggatccaatctaatatagttagataagagagaaataacaggcttacagactctaaccaagtattaataatgatactccatcagcgtagtctggtgattgggttatggtagttatgtgactctctcgatatttgtcacatccaccaagctaaagcttcagttgtccttgtcatgcacattgtattacatgactctaaataatctaccttattttaacctttagttgctattttcttaagtacattttttaatttttggtgtatttttgcagtatccctttttactggtctaaatatgaatgtgcagacttatttttcatattaattaattccttctaaatgtacattgtgttgctcactctagcttccttcctcaaagatttgataagcaatataatttttttttttgagatggagttttgctcttgttgcccaggctggagtgcaatggcgcgatctcagctcactgtaacctctgtctcctaggttcaagtgattctcctgcctcagcctcctgagtagctgggattacaggcacccaccaccacacccggctaattttttgtatttttagtagagatggaagtttcaccatgttggtcaggctggtctagaactcctgacctcaggtgatccaccctcctcagcctcccaaagtgctgggattacaggcgtgagccaccacacctggcctaagcaatataattttaagtctccattatgaatatatgataaaataaaatacatacaatgatgaaaacatagctttttaaacaaatgaatagcagcacttagggtaacctgaagaaggggtttgattgcctagaaagttcatttgctatattgactctgaaattacttggtatattttatcagctacttagattttttccatcactgtttctattttctggtatatatgtttttataaaccaaaaaaattagctatactagtatataatagatttttgtgacactgaatatttgtactcatcccagggtacatgtagcattattcaaagttatatggtaagtatattaaacagaacaacatatatttgaccaaatctgttccatttcagacattgatgaatgtaaagagattccaggcatttgtgcaaatggtgtgtgcattaaccagattggcagtttccgctgtgaatgccctacaggattcagttacaatgacctgctgttggtttgtgaaggtaatctgaataaagtatgtcctttatccagtataatttggtatacatatatagcatttagatggtttctgatttttactatttcttctacaatttttcaagagttgatcatcaaagtgtgacgtgaatgtaatgctaatacaatactaaaaaggactctttaaaatggaattgttgctctttcagatatagatgagtgcagcaatggtgataatctctgccagcggaatgcagactgcatcaatagtcctggtagttaccgctgtgaatgtgccgcgggtttcaaactttcacccaatggggcctgtgtaggtaagaaagaggctgactcattctttggcactgagcacaagattccttagatttcctatcaaaaaatacttcaagaataatttgggaaagattttctcacttaacctgttcatttatagtgaacctatttcaccatatcttttagatgattttgttaagaaaatagatctcttcaatggatttccccaggattggacctaaaataaaataatatccttcagataccaataaacataaaaaaatttgcatgattaaaaaaagagggttggatactttgaagtcctgctcattttgattcagctgttgttatggttcattttcagcctgcctataataattaatagcagattagagaaacacaactgtgaaaaatgaagaaatcttaataaaaatcagatacatgtaacatttatttttttctgttttagatcgcaatgaatgtttagaaattcctaacgtttgcagtcatggcttgtgtgttgatctgcaaggaagttaccagtgcatctgccacaatggctttaaggcttctcaggaccagaccatgtgcatgggtaagaagggcatgtggctccagggagtgaagtggggctggggttccagaacagatcacagttccatcaagtgccatgagtaactactatgtctctgtcagaaacaatcttgcaaaaaattaactaggtcaaactatttaagtcttgattcaatataaaatttgcaagcagggacatactgcaatatataaaatttgcaagcagggacatactgcgatatgttcgtcagttcagtgattcacagctttttctccagaagatgttcacatggcttgacaagaaaaaaccctctgagccacttgggcttgtgtggaacttaccatagcacccgctgccctttactttcatgtttctactcaagacaccattttggaatgcaagagagtagtaagagtgacagcattaaacttaataaatttatacacatatgcacatacttttttaaaacaaattgttgaatagtgggatttatgtacatattttgtgttttatcccttaaaaatagctttaggagcaaatatagccaaactctttaaaaattcccagtagctaatgtaatgggtagccaagtggtaatagagcttagtgagtacttgctgagctgatgattaataggttttcaaagacagatgggctggatgccatgaagctgggactgagtataaccccttaagtctgatgtcagcagttggctctgcctctgctgaagagttttctttctgtgctttgcacttgaaaggggaaaattaaatttaaaacttggctacttgtaattagcattttctcagtgtagaaaaggctagggctgttcagctactcttgatattcaagatattatctatgtgaatattaaaatcagatttcagtactgcaggactggtttccttcatgacacatccatacaacagggaatacctggagtatgtctccaggttcatccattgcctcctaaagccctccctttggacttctcctataatggcagggaaaattctctaggtgatgtttatacaaaggaatatacaggatctggtcttatttgcatgaactccctaagaatgcttgtttatacatgcttcttcttgctgtactcccagagagagtatgatttaccaaaaaaaaatatgagatttatgattcagaatttcgtatggggaaaatctgtccactcataacaattcttccatgataaaagctagtcagattcttcagtaagacctcccttatacagagcttccttcctaaagaacaataccagcccccaccctttttttggtgtggtagagtttcagcagcctggaattcatagttggggagtctgctgtctcatatgatgaatgacctttctaaatattttcttaattcagtttttttgaaggctaatagtgaattctaataaacctcaatttggatttcattacttcatacaattaagtaaactaaagtttgtctttgtttttctgctcaaattaagggatttaaatttctgggtaagtgtttataatgccttttattatgaaagaaattgtttcagtattttagaagatcagttttatttacgattattaagcagacctgctcattaatacatctctactagggggatgctctcttaggctatgtctgagtattgtctgagtacagtcagtacctgttaaactgtactattttcttagaattttacaattttgattcttgtaattttgatttttccgtatctcttactcattttcctcaagtagatatgagtttctagtactgaatgaggaaaatctaagtaattccataagttaaacatataaaacggttaatagcccatttttttctagttaaaaattgaattttttgagcctatatttctttatagatgttgatgagtgcgagcggcatccatgtggaaatggaacttgtaaaaacaccgttggatcctataactgtctgtgctacccagggtttgaactcactcataataatgattgcctgggtaagtacttcattcagtcctttattgcttctatttcatttccacacaatgtgctgaaataaaaaacaaaactaaagaacaaaaaaaaattatattactaaaattgcaaatatgtgccaaaagatatataatttcattgactggtttctagttaactgaaaccatagtattggcctaaattgtcacaagacaatatactcttgaatccttttgtcaatcagccaatcatttcaggaaaaaaaggtcattcagatcacagtaaacatatttggactgatttatggtttagggtatttgtatttccttaatgagatcaaaaatagacccttcattgtctcaatgttattacaagtatttcatttaaatccattctggattatttacattcaagtaccagtagcctcctgcttacacctgtcatgacatttcattttccatcagcttttgaagccagaatgcctttccccacaaaaataatgaatggtgactaggtttctagataagccctcagaaatatctcctatgcgccatacaggactttagtctttggcccacagcaacacacaaatgtgaaatggaaacatagtgagtgggagagggtcctgaagtagttggaggagagaataagagaaatgacagcaaacgtttattccttgtttactgcatgccaggaactgcatgggtaatttacagcataatgtgttgtaattcgcatggccctgcaaggtatgtgaaagaacttaggttttctaccattgtgggactacatcagagctcatccccacgtcctcatttaacccaacataagttcctctctgttttctttatttttcaaaattccacaattgtgaaaaaaagtagagctaattggacattttattcaactgctgccttcttgactagtttcttagagcctttgtacagtcagggagaactaaaacttaaatgaaaacttaatacttaatgtcttttttctttcaattatgtttgatatcagcaattccagtgtttttaatatcattgattttccagtaataaataagctcatttatttgttctctgaatatgctcagcttagctccaggtaaagtatatgcaaattaggcaatcagattaaatcccacatatcctcctgcctgtgggaaaataaatatttttcagttagaaagaatggaaagcttcaccgtaaaccttgatttttatctggttctaaattcatgagttatattaatatcaaaaatgaaaaaaatgtatctttatggttgaaaaatagtaggactctatgggatcctattaattatatgatccttatgatatgtgccatttttctctgttgatgaggagttgtaatatgggatttcttataaatgcatgccaataagtatgtttttaagtagcgtcttgtgaaacaatatacatgttaagagctctttctgaaaaacatactcctgtttgcttacagacatagatgagtgcagttccttttttggtcaggtgtgcagaaatggacgttgttttaatgaaattggttctttcaagtgtctatgtaacgaaggttatgaacttaccccagatggcaaaaactgtataggtaagtatttaaataataagcagtctttgtggtgttatgttttgtaaaatgatgatatgtgcctccctcctttcacttaagaactcattaatatttcatttaatcatcagagcacatgaccaagataagctatgatggaaaattttagtataaggtatcaacaatgggaatgtctcataggcagtgtttttactggggacagagcttgaggctgtccatgtcttaagaaaagtaagcaaagacaacaaataaagaaaattagccacttgccaaataagaaatatccaagatgtcagaagagtatctttggtaatatttgttcatggtgacccagtagatcagaggacccgagttgaattcatgttaatatcatttggcagacagataaatctatgtaacaattatctcatgcttaaattattttttctcttctttttctctaaagacactaatgagtgtgtcgcccttcccggctcttgctctcctggtacctgtcagaatttggagggatccttcagatgcatctgtcccccagggtatgaagtaaaaagcgagaactgcattggtaagagtaacatttattctgaggcccactagtagttcagtatagtaagacatggtaaagactctggaaacatactaagtgccaaccactgcaagcatgctgacctaaggaattaaacatatagctgcctacatctgttttactgaaccatcagaaatgatggtgagaataaaaaacttagggatgtaggattttttcattaccagaaatctaatgctagtcaaagaattttcagcatatgctaattaatcttttttccaaatgtcagcagcgactttcagtgaatttaaagagtgtctacaaaaattgtaatctttggcacccagttttaaaacagctattaaaggtgtctagggtcttagaaatgtgaagcagaaaaatctcgacaatgctgttgagacattctttttcttgggaaggcctcatgtcaaagcagcaaatattaatccatttgtcataacagatgtttttctgttgaaacccttccagcacacacgaacactgtaaccacatcaaaagtgtgtcccagaattgcctagtggacatgatgaagtccgaccttttttacagttcactttatttcacttttatacaaattattttttacagccttgttgaaattcagaagcaccagcattttagtgtggtttttctaacgtgaaaagatgctaaggatattttctgcctttgaattatccaattctatcgcccttggcaagattctacctaaagatatgtcattctactgttcatatttaagggagttaaatagggcagaaggaagtagtttacttcatagaatttaattattcttcagaccacataattagataccatgggtatcccctagtcattctgattttctgatttgtatagttcattataagactagtgtttttaatacttaaaaaataataaacaataatactagaatcatctcagtgagaagtttcttgaaaagtttaaggggggaggagccaagatggccaaataggaacagctccggtctacagctcccagcatgagtgacggagaagacgggtgatttctgcatttccatctgaggtgctgggttcatcttactagggagtgccagacagtgggcgcaggtcagtgggtgcatgcactgtgcacgagccaaagcagggcgaggcattgcctcactcgggaagcgcaaggggtcagggagttccctttcctagtcaaagaaagtggtgacagacggcacctggagaatcgggtcacttccacccgaatactgcggttttccgacgggcttaaaaaacggcgcaccaggagattatatcccgcacatggctcggagggtcctatgcccatggagtctcactgattgctagcacagcagtctgagatcaaactgcaaggcggcagcgaggctgggggaggggcgcccaccattgcccaggcttgcttaggtaaacaaagcagcccggaagctcgaactgtttggagcccaccacagctcaaggaggcctgcctgcctctgtaggctccacctctgggggcagggcacagacaaacaaaaagacagcagtaacctctgcagacttaaatgtccctgtctgacagctttgaagagagcagtggttctcccagcacgcagctggagatctgagaacgggcagactgcctcctcaagtgggtccctgacccctgacccccgagcagcctaactgggaggcaccccccagcaggggcagactgacacctcacacggcccagtactccaacagacctgcagctgagggtcctgtctgttagaaggaaaactaacagaaaggacatccacaccaaaagcccatctgtacatcaccatcatcaaagaccaaaagtagataaaaccacaaagatggggaaaaaacagagcagaaaaactagaaactctaaaaagcagagcgcctctcctcctccaaaggaacgcagttcctcaccagcaacagaacaaaactggacggagaataactttgacgagctgagagaagaaggcttcagacgatcaaattactccgagctatgggaggacactcaaaccaaaggcaaagaacttgaaaactttgaaaaaaatttagatgaatgtataactagaataaccaatagagagaagtgcttaaaggagctgatggagctgaaaaccaaggctcgagaactacgtgaagaatgcagaagcctcaggagctgacgcgatcaactggaagaaagggtatcagcgatggaagatgaaatgaatgaaatgaagtgagaagggaagtttagagaaaaaagaataaaaagaaatgagcaaagcctccaagaaatatgggactatgtgaaaagaccaaatctacgtctgattggtgtacctgaaagtgacggggagaatggaaccaagttggaaaacactctgcaggatgttatccaggagaacttccccaatctagcaaggcaggccaacattcagattcaggaaatacagagaacgccacaaagatactcctcgagaagagcaacaccaagacacataattgtcagattcaccaaagttgaaatgaaggaaaaaatgttaagggcagccagagagaaaggtcaggttaccctcaaagggaagcccatcagactaacagcggatctctcggcagaaactctacaagccagaagagagtggcggccaatattcaacattcttaaagaaaagaattttcaacccagaatttcatatccagccaaactaagcttcataagtgaaggagaaataaaatactttacagacaagcaaatgctgagagattttgtcaccaccaggcctgccctaaaagagctcctgaaggaagtgctaaacatggaaaggaacaaccggtaccagccgctgcaaaatcatgccaaaatgtaaagaccatcgagactaggaagaaactgcatcaactaacgagcaaaataaccagctaacgtcataatgacaggatcaaattcacacataacaatattaactttaaatgtaaatagactaaatgctccaattaaaagacacagactggcaaattggataaagactcaagacccatcagtgtgctgtattcaggaaacccatctcacgggcagagacacacataggctcaaaataaaaggatggaggaagatctaccgagcaaatggaaaacaaaaaaaggcaggggttgcaatcctagtctctgataaaacagcctttaaaccaacaaagatcaaaagagacaaagaaggccattacttaatggtaagggatcaattcaacaagaagagtgaactgtcctaaatatatatgcacccaatacaggagcacccagattcataaagcaagtcctgagtgacctacaaagagacttagactcccacacattaataatgggagactttaacaccccactgtcaacattagacagatcaacgagacagaaggtcaacaagcatacccaggaattgaactcagctctgcaccaagcggacctaatagacatctacagaactctccaccccaaatcaacagaatacacatttttttcagcaccacaccacacctattccaaaattgaccacatacttggaagtaaagctctcctcagaaatgtaaaagaacagaaattataacaaactatctctcagaccacagtgcaatcaaactagaactcaggattaagaatctcactcaaaaccgctcaactacatggaaactgaacaacctgctcctgaatgactactgggtacataacgaaatgaaggcagaaataaagatgttatttgaaaccagcgagaacaaagacacaacataccagaatctctgggacacattcaaagcagtgtgtagagggaaatttacagcactaaatgctcacaagagaaagcaggaaagttccaaaattgacaccctaacatcacaattaaaagaactagaaaagcaagagcaaacacattcaaaagctagcagaaggcaagaaataactaaaatcagagcagaactgaaggaaatagagacacaaaaaacccttcaaaaaattaacgaatccaggagctggtttttggaaaggatcaacaaaattgatagaccactagcaagactaataaagaataaaagagagaagaatcaaatagatgcaataaaaaatgataaaggggatatcaccatcgatcccacagaaatacaaactaccatcagagaatactacaaacacctctacacaaataaactagaaaatctagaagaaatggataaattccttgacacatacactctcccaagactaaaccaggaagaagttgaatctctgaatagaccaataacaggttctgaaattgtggcaataatcaatagcttaccaaccaaaaagagtccaggaccagatggattcacagccgaattctaccagaggtacaaggaggaactggtaccattccttctgaaactattccaatcaatagaaaaagagggaatcctccctaactcatgttatgaggccagcatcatcctgataccaaagccgggcagagacacaaccaaaaaagagaattttagaccaatatccttgatgaacattgatgcaaaaatcctcaataaaatactggcaaaccaaatccagcagcacatcaaaaagcttatccaccatgatcaagtgggcttcatccctgggatgcaaggctggttcaatatatgcaaatcaacaaatgtaatccagcatataaacagaaccaaaaacaaaaaccacatgattatctcaaaagatgcagaaaaggcctttgacaaaattcaacagtgcttcatgctaaaaactctcaataaattaggtattgatgggacgtatctcaaaatagtaagagctatctatgacaaacccacagccaatatcatactgaatgggcaaaaactggaagcattccctttgaaaactggcacaagacagggatgccctctctcaccactcctattcaacatagtgttggaagttctggccagggcaatcaggcaggagaaggaaataaagggtattcaattaggaaaagaggaagtcaaattgtccctgtttgcagacgacatgattgtatatctagaaaaccccattgtctcagcccaaaatctccttaagctgataagcaacttcagcaaagtctcaggatacaaaatcaatgtacaaaaatcacaagcattcttatacaccaacaacagacaaacagagagccaaatcatgagtgaactcccattcacaattgcttcaaagagaataaaatacctaggaatccaacttacaagggatgtgaaggacctcttcaaggagaactacaaaccactactcaaggaaataaaagaggatacaaacaagtggaagaacattccatgctcatgggtaggaagaatcaatattgtgaaaatggccatactgcccaaggtaatttacagattcaatgccatccccatgaagctaccaatgcctttcttcacagaattggaaaaaactactttaaagttcatatggaaccaaaaaagagcccgcatcaccaaggcaatcctgagccaaaagaacaaagctggaggcatcacactacctgacttcaaactatactacaaggctacagtaaccaaaacagcatggtactggtaccaaaacagagatatagatcaatggaacagaacagagccctcagaaataacgccgcatatctacaactatctgatctttgacaaacctgagaaaaacaagcaatggggaaaggattccctatttaataaatggtgctgggaaaactggctagccatatgtagaaagctgaaactagatcccttccttacaccttatacaaaaatcaatccaagatggattaaagacttaaacgttagacctaaaaccataaaaaccctagaagaaaacctaggcattaccattcaggacataggcatgggcaaggacttcatgtccaaaacaccaaaagcaatggcaacaaaagacaaaattgacaaatgggatctaattaaactaaagagcttctgcacagcaaaagaaactaccatcagagtgaacaggcaacctacaaaatgggagaaaattttcgcaacctactctgacaaagggctaatatccagaatctacaatgaactcaaacaaattgacaagaaaaaaacaaacaaccccatcaaaaagtgggcaaaggacatgaacagacacttctcaaaagaagacatttatgcagccaaaaaacacatgaaaaaatgctcaccatcactggccatcagagaaatgcaaatcaaaaccacaatgagataccatctcacaccagttagaatggcaatcattaaaaagtcaggaaacaacaggtgctggggaggatgtggagaaataggaacacttttacactgttggtgggactgtaaactagttcaaccgttgtggaagtcagtgtggcgattcctcagggatctagaactagaagtaccatttgacccagccatcccattactgggtatatacccaaaggactataaatcatgctgctgtaaagacacatgcacacgtatgtttattgcggcattattcacaatagcaaagacttggaaccaacccaaatgtccaacaatgatagactggattaagaaaatgtggcacatatacaccatggaatactctgcagccataaaaaatgatgagttcatgtcctttgtaaggacatggatgaaattggaaatcatcattctcagtaaactatcgcaagaacaaaaaaccaaacaccgcatattctcactcataggtgggaattgaacaatgagaacacatggacacaggaaggggaacatcacactctggggactgtggtggggtcgggggaggagggagggatagcattgggagatatacctaatgctagatgacgagttagtgggtgcagcgcaccagcatggcacatgtatacatatgtaactaacctgcacattgtgcacatgtaccctaaaacttaaagtataataattaattaattaattaaaaaaaagaaaagtttaagatcctgttgttcttccattttctttgctcatgctcaatcttgattcttctttgtctctgtgatccttctctttatggaatgctaataaaagtagtgtgtcagccactaggagggaaatagaaatacatatgcctccttgtattaggcagtcttggctacctttcctcttaatgaaagtatggatagcttttatttcattaagatatcatatattattatttattaagtttcagaaatatttcgttttccttcatctatcgttagcaatgacactagtttgcatctctgaaaaaatggttttaatttattactttttttttttgagacggagtctcgctctgtcactcaggctggagtgcagtggcattatcttggctcactgcaacccccacctcctgggttcaagtgattctcctgcctcagcctcccaagtagctggtattacaggtgcccaccaccacgcctggctaatttttgtacttatagtagagacggtgtttcaccatgttggccaggctggtctcgaactcctgacctcaagtgatccactggcctcggcctcccaaagtgtgaaaaaatggtttttaattaacttacttcactgtaagattttcttcagactagtatcttttctaccaacttttcccagatgacattctaacatgaccacacacacacatacacagacatagatatgtgtacacataccctgcacagatataaattcattcctacattcagtgggtatgacagtgaacatttggcacctttctaggtgctagaaatacaggaacatcatctttgctttggggtaacttactacctaaggggagagacctattttgtaaataaacctgttttgtgaagacatccttataatacaatgtgacagacattgtactggaggtctgttcaggagatgggagcaccgcaggaggttagggatcattatggtagttgtgagagggtggcagttcaagaaagcctgtcacagaggattgatgattgtctaggtcactcttaaatgttggataggattttactgatcaaccaaagaaagagaacagaagaggctatttggaaacataggcagcatgagcacgacaaggagcatagaatggctggctcagaagattgaactcaggcctgcggtcagcgtggagccattgcaggagttgttgtgtttgttttttttgttgttggtggtggtggcggtggtgttggtttctgcagttttttgttgttttatagaagggatgtgatgactcttttgttaaacttctaccaacataaattgagaacttgtgtgtgccagataccgtgctaggagctaaaggtgcaacagcgagccagacagacatgtcatgtcctcatggagcttacgttctaatgtgcctgaaaagtagtattttttcatgtgattaaaacattccattaaataagtacttcccacaaaaaaaacgacgaaaaatcactagtcaggcaggcatgcttatttattttaaggaagcgttctggggaaagggggaaatgataacactgtcaaaatatgtctcagccctccatttccataggcacagattttcaaatgtaatcagatggacgttttagaaaggcagccctggtggcaatgtgacaagaagaagacattcaggagatgtagacatcagttgagagactggtggcaaatgatgatggctgtggaagtactgaggaggtagaaatggctgccacattctgcttgcatgtggagtgaaaaaaggagagaaataggggtgacatggggatcacaatttggattactgagagagagttatcagggagaaggggaccagttcatagaacatttggccacatggagcctgcaatgcccatgagacatggagttgttcatgtcaggtaggcaggtagacatacatacacccctaaagatcaaagacaggaaggtggacatggacttgggactctctggcacatggttggttgaaattacaacttttgacttctgaagcaataatagtttatttttatgaataagttaaacatacaacgtaatatctcttgtctgaaatatcagctggctagtggacagtgatagtatggacaattgtttattttcaagtgttgaatggctaataaatactccccctgttctgcagatataaatgaatgtgatgaagatcccaacatttgtctttttggttcctgtactaatactccagggggcttccagtgcctctgcccccctggctttgtactatctgataatggacggagatgctttggtaagatttggcatgacttcactgtcacagttcacgcttagaaactttaaagctgaattgtaaaccatcatgctggtattagtcctaacaaaatacatgtctatgctaaaatacatctgcaagttaaaaatttaggtctcaaacataagcaatgaacaatttttaaggtactttgaattattgccactgtttctacatttttataaatttttttactaaaagaaaaattcttattctgatttatcagaatgactatgttaattttgttgttgtcatagcttttttgtttgttggtgtatgtgatgcttttgatgtgatgtaacttactgaaagttaccttgattgtttttcttagactatcatgcaacagtgaaaaaagagactctgtgtggaaatcactttgatactgagcatgatttctcgaattttcttagcacattataaaaatattttaagcatattaaataattaaataattttatagccaggtcagtctaaattggcaaatgaaatcagcaatcgaagatttccagacctgccttaactgctgatctagtctgcatcccgtgttctacaatgagaaatgttctgtccaaacagtgttacaaaataattccatctgtaatgtttgcttttttgattagatactcgccagagcttctgcttcacaaattttgaaaatggaaagtgttctgtacccaaagctttcaacaccacaaaagcaaaatgctgctgtagtaagatgccaggagagggctggggggacccctgtgagctgtgccccaaagacgatgaaggtaagagcaatgacatcatcagacagcactttgtgtaccagtttttgaatgtttgccagagtgggtttaaccatgtaatttaagaatattttgagagtgaaatcatctccttgcatataagttttgatggttcattgaacaacctagcctgagaaacttctttcagcttttgaataagacatgtctaagcacaggtggagttacccttttatttcattccccacctccaaggttagtattacttgctttcaaaagtacgaatttgagaggtccaaggcaggagaaagaagggaatggaaattatattccaggttgctccaggagtcccatgtgggcattgtatcacaggctgtggctctcagaatgttacattaaattctgagaagctgagtcagcacaatggccctttacaggaaaagatcaatagcctcaggtctcattggcacccataaattataggataattcccagcaaactccagctggcttggcctctgggttagggatggcttctgagtgtgatgggcagggaagttctctttagctgctcagctttaaatgagcaaacagaaagaaccaggagcactgagcaggtggcaccctagaaggtggccctcactaaatatgcttttgaaataaatcataaaaataaaagagtcttgttatagacagctttgtaatggaaacataattaagtgtaatttcatgtatattgttcatcctttcttaagttctttgataatttcaagtcttcaataatggagaatttgtatttttctttgtagttgcatttcaggatttgtgtccatatggccatggaactgtccctagtcttcatgatacacgtgaaggtacgctttgatatattttattcctatattcttatttaatacacacgtattattttacatttattttataactcatgctaactttactatgtaacatatagtatattgtatttaatggatgtatataacccttattttgtatcatatacattatacatatatcataagattatatcgtgatatatgaaatacatatttctctgacaaaagaagtatttacaagtctgtgttgaatagacatacacagtactggcatatctttttatttttattttatttatttatttatttattttgaggtggagtctcactctgttgcccgctggaatgcagtggtgcgatccagctgactgcaacctccacttcctgggttcaagtgattctcctgcctcagtctccccaagtagctgggactacaggtgtgcgccaccatgcctggctaatttttttttgtatttttagtagagatggggtttcgccatgttgcccaggctggtctcaagctcctgacctcaggtgatccacccacctcggcctcccaaagtgctgggatttataagcatgagccactgcgcctggccggcatatctttttatatgaggaaattcacatgcagttctatattttagatgtcaatgagtgtcttgagagcccaggcatttgttcaaatggtcaatgtatcaacaccgacggatcttttcgctgtgaatgtccaatgggctacaaccttgactacactggagtacgctgtgtgggtgagtgttggctccacattacagaattttaaagttctattttacttctcatattcagtaaaaggtctctcaggtaccctgggtgatggggggatttacaaatccaggataaatagctagtagtggcaccttcttcaccagtcttacattttccagtcagacctgatttatgtgaagatggagagagttaacaacctctgtcttcaaccaaacatacaaaatcttatgtgtcctagagacttacaattgccaaaatctctcattggataagaaatccattttactttatgcccttccatgcctgctcttgaagcagaggaccacattcttcttctggatttgtcatctttagggcgagtattgctgcctgggggccagagcattgcacattgatccttcagaccctctgcactacatagctgccagccagccaaggcccaagggatgccagggttacatgtgcccttctcagatcctggaaatgggtgagggccaagcatgggtcttcctgggcattctcctgttaaactaaaacatctttgtggcagtttcttattcttctttttcagatactgatgagtgttcaatcggcaatccgtgtggaaatggtacatgcaccaatgttattgggagttttgaatgcaattgcaatgaaggctttgagccagggcccatgatgaattgtgaaggcaagtgatctttgtcttaaatattatttcttcttgacatagaaagtgttttttaatgtctcaatatttatttatattgcttctgatattctgctggtgagcatacggtggggttttttgttttttgggttttttgtttggttggttggtttttagttttcctttagtacagttaaaatagctgctgtaaagcccttgtctgatcattccagcatctgggtcatctcagggttggcatctcttgattgtctattcccttgaaatggagtcacagtttcctgccttttcagtatattggttaatgttggatttatactctggatattgtgaatgatatgcttcgaaatcagttatattactctgaagaatattgatgtatttgtcttagcagacagtcaactctggtaggcacaatagcagaccctcaggcctcagaagggcggtggctcatctgtcagttctttaaaccttactcactagcattcttgattttgccccacacatgcatagtacagtcatgccacttgagctgactagatgaaaaacaaatagtatttctccttccctggcattctttcctgggttccctttctttagcagacttggttgccctaagattccctcccctccttcctctggatggaatctcagaaagtttcttctggagagttagctaccagatgacagcactgccaggccatggtcatctggagggtaatttcagaaaaatagaagccaaatcaatgtgaaattactccctactggttgtttgctctgagtttcagctcaccactaaaaacttcaggtactttttatattctttccggagtttatagctgttatttttaaagatgagtttgttaggtactaaattctgcgtaccagatgtgtaagttctactattctattgctttgtgtatgaccgccaagtaaatgacatcaacatttagttacacaaataattagaactctaggctgagcacattcctgtccattcctttggtcagatatcaacgaatgtgcccagaacccactgctgtgtgctttccgctgcatgaacacttttgggtcctatgaatgcacgtgcccgattggctatgccctcagggaagatcaaaagatgtgcaaaggtaaggcctcagactcgggagtagttcgaactttatttgtcatgctggagatacatcttaatgattttatagttctcaactaatttcttctagagctttacagaaatatatatatgacagcattttgctagtagatttccatacctagataacaagacacatgatggtatttttgtaaaatcaagtccgagataagatgggttgagaagcccactattctcacactcttggattcttattaaggcaaagattgcccttccctaaacttcttatcactatgagcagtgctgaaacttacacatctggaatatagccaacagctgacaatggctgggcttctcctttctctgtcccaccataaaattacatgttaagtgtcagaagaccacacctgtgacttaaaagtactaaactacagcttgctccagataatttttaatttttattttttgttctagatctggatgaatgtgctgaagggttacacgactgtgaatctaggggcatgatgtgtaagaatctaatcggcaccttcatgtgcatctgccctcctggaatggcccgaaggcccgatggagaaggctgtgtaggtaagcggtaagggaaggtgtctgcttatgtaatgcctccactcccagcctcattaatggcactactcccacatcatcttaactgcaagccaactctttttccagctgtgttaaggcagtgatacagctagctttcttccatctcagggtctctgctaatataataggttctggattgtggcatttatgcctgctcaagaatacatgcccttttgatttttcatattttaaagaaaattgtaaataaaactatatgtgttctgtaggtacatatgtaaccaagtaaatatatagaaaaacattgaaaaaggtaaaccctaattcatagaaggaattactgctagggaagacatcgagattagaagtaactagtctgaggtgattttagctgtatctgtcaattttaattattttacaaaagagtgagtttctgaactattctgaattacatgtgtcatataaaaaattatatatacaacaaattataattggattttttagtttcttttcatttgttagatatttcattcaaatatagtacttaataaagttaaaaatagacgtacataggaggtgtagttatgcagtgattctttcaaaaacactattcttccaagatctgttatcccagaagattaacctaaactcctaagtcatatgtgttcctccaaatctagcacagggcaaaatgctaataaccatgtatggaagaaaggaaatcagcattcttaatcatcgtgtcttcttactgtacatgaaatttcttttcattcatttctcttttaatttatttgaatgaaaacaatgtatgtatgtgctatgtttaatcagattggctaaaatacttaaaaatgtgttttaatttttatgcatggaaatttcttatttttataactagctgaattttatattatactatctttattacatttaaagatatgttgttgggaaagagggagtaagcactgtgatcagattaagaacacaggtttctggtcatggatctgccataaatgatctggatgacttgcaagtgattcaattctctgttcttcagttccttcatctgcatacagtgagaaacttagtctgcatgattgataggagtggtgggggtgggtgttgggaagggtgcatctgctctagctctaaaattctatcatcctctgaacttactttttcaaagaaaagaccaagagcagcattctacatttgtattcttttcgttgttaaacagcactacaaaagatacaggttctgaaacttttctgatcttcaagcttttcattataccatgctgatagctgaaatgtctgcaaaatttttttgatcatcacaaaactctttgtagaacactttcatgcaaacaatgtgttttcacaactagaaattccagtttaaaaacagtaaaaatattattacaaagaaaaagtatttacaaaagtcaggatgaaaaataaagccacaaaaaaaatcaataaaaatgccaatgcatgaaattggaatcaaacttacccaaaaaagtcgattgcaacggaaactaaaagtattacagttaagggaattaaagttatacaggaaatctaagacctctttaatgaaaaccataaacctaatcagagacggaaacttgactatgcaatatattatgcctcagtaattatttcttaaacaaataaatgaatcaagaaatctgataagtagaacatttttttaccaagatcattaaattttcttctttagactttggcagactgtcccaattttttaaagtttatccaacaatctttgattagaagatcagggacataagcaaatgagaaaagtatggagtgtttttgtagagacccatttctacactgcagtgtgaaaataggtagatgcaaaggagaaaatactgggatgctatttaattatcaacaaactagtcttctagacatggagactgccggaggtgaggcaggaagaggagaagcagcaactatcagagattctaaggctttaagaactttatcagagccacacgactccctaaattacctgaaagcccgagtgtagtgcctcaagggtagagagcatggcagatttggtgagaggatgttcatacaacaaacatgaattgaaactacacattaggcccactttaggacccgtgaccagctacactatttttcagccagtagctgaactggagaaaattgttcaaagatgagtaattacacaagaccagtgtagctgaagcttgtgcaggagagtggcatgaagtgggtctaaaggtaggcaaataccatggaaaagaatttggttttatgctaaaagtgttacggcagagtgactcagagtatgggccctggggatggactatgaatgttagcaatctaggttcatgtgtgctagctctgtgaccctgggcaagttggcttaaatatgtgcctcagattcctcatgtaaaaacaaataggaattttgagcacactttcataggattattgggagggttaaattaaaaaattcacatgaaacccttagtacaatgcttggcatagagtaaaatttcaattaagtattagttgttatttcctattttacacatttttaaagatatctggctgccttataggtaatggatttgaaggaggtggtagcagaaacaagggtttcatttaggtgactgtcttaaacatccagacgagagaaaaaggaggctcagattagggccaccatagtgtggaaaaggagtggacagattcagaaaatgtattggaaataatcaacagattggatttctgatggattgattgaatatgtataaaagataagtcccaggatttttgcttgagtgactaaagtaaattagcttagtataataatttacttgatgctactgttaactgatatggaaaagattggaagaaacaggtttcgttggggacacagaagaataaaagttctgttttggtcatgctcagtgtcagatatgttctagctttccaagtgggaatatcaagtcagcagacatatttatgagccatagatgtaaattgctagcaaatcgatagtgtttgaaaaattatgggattgactgagaacaccaagagagagatcctggagagtaggaggagcagggctccttcccaggacactggactctggttgttccaatatttagagagactaaaaatattaggagactaagaaagagtagccagcaagataggaagttctccatgtccgtgtgatgtcctgagaactaaagtggccgcttttgtatgatgctactaagatgtagagtaacatagagttgtaattagatttggtgacttcttcaggaggtttcagtggagcacacacattaaggaaacaatcagtgatgaggaagtggaatttatcgccatggatcattcttccagaaattttgttctgaaagtgaatcaatacatgtggcagtagccacaggggtaataggtgaataagagagttttttgtattgttttaagatgaaagttactagagaatttatgctgagggaatgattccttgaaaagggagtattgtgaaatctgggaaggcaatctagagtaccggtgcaagagctggccttggagaaaaaacaaagatagtttagctgttggaagaagacaaaaggttgaaagtgagggcatagcccagtggttcataggggagagatgtctgatgtgtctgagtgtgtaatgtcattttagaaagtgagagtgtgaagatactaagaagtatagtaggattgttgacggaggatcatgtacccatttgagatttgagtcttgagtcttgagtctcattgaaatgaagcctgttttcctctaggctgtcatgctgcactggattggacatagagtaggtagaagtaggggagcatcggacaagagtgatggacaatggaaaggtcgataattgacaatcctgctgcagcccacaaattgtcaaagggtagaaagtacaatgctggaaatcaacattatttaggtagagcaacatcactccaagatacaccctattaaagttacaaatttcaacagaaaaaagaatcaggcaactttttttcaacctcttctcagtaattctttatgccaatgtcaataaagcaaaattaatctaagaatttgaagcacaaattatgtactacagaagaaactgtattatacataatcaaacttggaagaactcaggcagtatatcctgagttcttccaagaacgcttttagttcaaaagccctttttgaaaaaaaataattcagacaaatcaaatacaattcaaaatcagggtgaatgacattaaggataggattagaccaaggcaacagaccttgcaccctcagattctagaaataataaactaaaaaaactttttaattcataactcattacttttgtatatacctttaaatttctgaagtaagtgtttttttctaaaaaaggaaaaaaataatcacaggaggcacatcatggtgaatttcaaaacactaagaagaaaatgaaaatccttaaaacttccagagagaaaaaccagatttcttacaaatgaacagtaacactggtttaaaaaataataataaaggagctgtattttgaaagcattctaagggaaaataattttgaactaaaatgctatactcaatcaagtatgaaaacaaaagaagacatggtcagaaatctgttttagaatacttatagccctcttaaataattacctgccgggcacggtggctcgcacctgtaatcccagcactttgggaggccgaggcaggcggatcacgaggtcaggagattgagactatcctggctaacatggtgaaaccctgtctctactaaaaataaaaataaaaaaattagctgggcgtggtggcgggcgcctgtagtcccagctactcaggaggctgaggcaggagaatggcgtgaacccaggaggcagagcttgcaatgagccaagattgcaccactgcactcctgcctggtcgacagagcgagactctgtctcaaataaataaataaataaataatcaccaaactacatacactaatttttttaaattaattgaagtggaagaaataatataagtggaccaatggtgagccaagaaaccagtaagcctcattaatttaaacagatgctgatggcacactaaaaatctaacaaaccaaaacttctagataacatcaacatggcaggtggttcagggagagagcagagataagtaaatttatgcaaaggtgcttactatggccgagagctttcaaaacagatacttcttggcattgatagaaaattattcattaagaatgtgtgttgaagttgttcagtggtttccactgtaagaattgaaagaagactgtgacttccaaatatgagttcatagggaaaaggagggcataggaagagggcaatcccacagtaaatataaaacaatataaaatgtcaggtgagactctaaacatatcagtaatcatgacagatataagtggtttaaactgctggttaaaagataaatgtgtttttaagaattctgctaggttctctttaatagaattgtagtaccaaaattgaaatctgagataggttgaaaataaaaatattcaaggcaaatactaataaaagcaaagtgcatgcaaatataaatgtcagtaaatttttaaaaattttaagtataaagatgaaaggagccatttatcaaaaagatgtaattgtcatgcgctctcttatgctcctaacaacacagctttgaaagaaacctcaaacaaaatttacaaaatatcaaaaaagcacaaaaagtaaggatatagagaattttagtgaaaacaattttgttgaagtaggtttatttatcaccaaccaaaagagcagtattacttaaactgcctctcccattaactaccctcacagaccatagttgttcctgtgattttactcaaaaccaatttagcagcttgtcctttattcctggcctgtgaggcttttactgtactcatcacccatacccaacacccaccatccctctccccacacctttctctaatatcacagaaactgacattcttttccccagagttcccatccttgcctggtgtctcagggcaattctattccttttggaggccaattttcaattctatatattaacactatcccttctctgcagaggataaagaaaagaaagaagaagacaacattatcttaagaaagaacccaccaagaaggatgaagtaaagctaaaaataaattaatattcacacatgaccatttttaatctcatcatattagtattttggcaaagaagtgttaaataagatataacccattagaagatagcttgtaaactataatttgacagttttctcattattcatattgtttgtttttctaaagatgaaaatgaatgcaggaccaagccaggaatctgtgaaaatggacgttgtgttaacattattggaagctatagatgtgagtgtaatgaaggattccagtcaagttcttcaggcactgaatgccttggtaagttgacatccaaatatattatacttggtagataaaacatctgttcatgatgtcatcacagaagagctccacatatatattcttgtctgctaaacaaatcccccaatctcaataatccacatgcttcttcttaaagatgcacatctattaaaatgatatatttgtacatgtgtgtgttatatgcacatctatgtgtaatgtaaataacaatcttaaatagtctttccaaaattaagattaattaagttctttggaaaatttggctttagtaaaacttacatcagaggatgatttaattccaaaagaaaatatttgcaatatgaggtaagctctgccacaattaatgcaaaataaatgccatatttcaaaaatgcagggaaggttactttttatattgtggtacagaaaaaaatgttttataaaacctttttatgggaaatatacatctcagacattatattttattttaatgttaaaatgcatacattataaatcattgtagttaattatggcagctgcaaaaagtgtgctgtagtaaaattcaaggtaaacaaagaaataagagcgctaagctgtttgactcatcacttgatttaacataaaaagagtatttcaactatatcacatttttttctgaatgacgtcatatgcttcaaattccaagaaatttttgatcaaaaaaacattttttgtttattgttatctctaatctatacctttactaactaacatcagtcttttaggaaataggaaaagtaacctacatataaagtgtaattttctgttcattttattaacagtttggctaggattgtttataaaactgtattaaagatttaattggcttttaaatctgaaaaaaataattttatttatatttttataaaatctactcagtccaagtgtttgaacagtctttcagatgtagaaaatatgagatatcagattgaataagtaccaagctcataaaatatagtctagagtttgctttccagaaactaatcctggcactcatttgtttaaaggaaaataatttaatttgattttcctttcacttgtattctacagaaatggtaggtcactatcatttagttggcaatggattggaggaaaaaatctatctatttctaaagtatagtatcactttttgtcaaatttaatagactgtagtctgtagtgaaagaatatgctatgaacttaactgccagcaaaacttaaataattaagacattaagctgtcttaattattcctaaggaggaaattcttgactgccctgcttaatttgaaagccaggataatgaaatgtcagttccgcatccttaactctttctactttgccatttcagacaatcgacagggtctctgctttgcagaggtactgcagacaatatgtcaaatggcatccagtagtcgcaatctcgtcactaagtcagaatgctgctgtgatggtgggcgaggctggggccaccagtgcgagctttgcccacttcctggaactgcccagtacaaaaagatatgtcctcatggcccaggatatacaactgatggaagaggtaaggagttgaggaaatttattcatataatcaacacattaaattttatgaattcagataaatgtgaaggaaaagtgaaaaattgatacaatcaaaagagtagctaaaatgtttataccttgatatttatatttgatgtgtgttttcatatatatgtatatagaaagaataatctttgctaatgctttagagattttaggagttaatcttcgtatcagacctaaggggtagaatgtattattcccattttaacagatgaggaaaatgaagcacaaagctaaggtaacaataagtaattttcccaagatcacacactttttaagggatggactttgagggggtagctttctagattccccccaaaatcattcatgcttagattgcaaaatgggtagtcttaaacagggctttcaccagagtctccctttatcccctcccatcacttgagattatttttccatcacatccatgttgctgttcacctgaatgatgaacaggtgctccagtgctattaggaatgtttgcagttagttatgtcatctccatttcttcatttctctttgattctaaccagttttacccttgcatatatgttaactcctgattgtttttgttgttttggtccacagatattgatgaatgtaaggtaatgccaaacctctgcaccaatggtcagtgcatcaataccatgggctcattccgatgcttctgcaaggttggctacaccacagacatcagtggaacctcttgtataggtaacgatgggcacctctatatccaggggtttgggggctaatcagctactgtttcctgcaagtcactcattatcagtagagtgtctttattatggagctttggaatatatattttattaaaatgttgccatcctctcaataatgtgcttcttaatcacacagcacttggcctttgtccagtaatgtgggatgcttaaaggagcctcagtaaagagagtttaaaagaacttgtgccacatccatgtgtcaaaaacagagaaactcttaagtttctgattctcaggttgtaaacctgagaaacaaaaatcacaaatacatactttcaacattttatattttaatttaaaatttaaagtgcacatttgtttgtcactctttgactgaaggaaaagggctttttcttatgaatatgtgtgtttgtgtatattaagagaatgttttccatgtttctctgctattattttgcataaagtataccaagtaagcattacctaaataaaatttccagctgcggagcagtctcagtacagaatccttctatcattttacaatttatttttcttattcggttttttattgtctcactcacacctatatatgacagtcgtggggcagaaaggacttagacttttgtcgggtctttccaaagtattcaacttcatttttattaaagaaaaaattttttttctcctttatatttcattagcttacttgatattctatcaaattacctatgtcaataacaagcacacttggcattaaaaggttaagaaaacccaactgacttctttgaaacagaagagcatgagtaatagagaataggccattaatcataagcattcagcattctgtgggcatcaacgccgtatgttatatggaggaaatggagattgtctgctatctcagagtccgagtaggaaagagatggcatatttcaaggaggacaattcaaggagggtctaacaaaaagactgtctatacacgtgtgagcagtgtgcacaaaagccaggaggcgtagtgctgtgtgctggggctgtactacccctgggccaaaagaaaagagtcagaagttattggaacctagaaaaagaaagttgtgctcagaggactgccttgagaggacctctgacagctgctccagtgactcagccagcctgagcctatcttgcagggagggagttgaggaaataagggccagacagaagacagagggcaagggagagcctccggatggagtctgtagagctccatctcttgggcctgagagcagagtggaccagggtgaggactgaatctgaaggggaaagtggaaggtttccagcaccatctgtgatcccacaagatgcttaaaggagcctcagtaaagagagtttaaaagaacttgtgccacatccatgggtcaaaaacagagaaactcttattaagtttatgattctcaggttgtaaaccaaagtatattaatctaaagaatgtagtaattttggacccagacagttgtctagacatcataatatttacccaagatccatagattgatttacaaagtaaacccgcatgttactttagaaaaaatccttctgtgcatcatttctctctggctatattccactttaagttgaacaggaaaaacaaaaagaatgaagtgagaatatggaaggaggaaagagtctggttgtttcttttaaccagtaatttaatcttcacatcacttttacttagaccttgatgaatgctcccagtccccgaaaccatgcaactacatctgcaagaacactgaggggagttatcagtgttcatgtccgagggggtatgtcctgcaagaggatggaaagacatgcaaaggtgagtgaagagtctctgacaatcgtgaccctagtctgtatcttttctttcaaatttaaatattagattatcaggaattatgccatgtgcatcaccttcattaaaaggtcccatcctagtggccatgttattgctcatagaaaaactctaccaatatgctcattgcaggaagcagagaggattaaaacccaagttaaaacagtttgcttcttatagaaaactgcataaattttaaaaaataaaataaaacaaaagttttggtatgggaagagatcgaaacaaatcactgaaataagatatttgttgttgttgcttatctaagcttttatttctctaagctacctttattacaggtttactgtggaaaagtgaaaatggataggtaaatttaaattttttgcttaggtagtatcaaaagtaattatttatcaagctaaattagatcattaaaatagtttcaatactatactcatatatttgattttatagtaagcctcatcagaatgaaattaatggactgagcaaatttttaaaatgtagattattctcagtaaaatgaggttttatttccaaggcatatcaaaaaaaaaaaaaataatagcaagcaccgcttggacctgtttagtgaactgaacattgtttatgttcagttgtacattgtttatgagtatgactaaagactccatatcaaaaaaaaatgagtatgactaaagcgttttttaagctgtaaaataataaattagtcttgcctacatcttatgtggtatatttattttaaatatagtttccaaattaagttttagtatagccaaaatcaaattttgagtttttaattagtagggtccaaatatcaataccatttgtgactagaattacaggtgttgtattttgcttcctctaatattaatgcccgtgttttcatctgaatgtggagactcttagtgtttctgttcggaccttcatcagtttctagattctgtttcatttttatttaatccttcctttaataggaatcagtaatcagccatgtactatactgcattcaatgcaagaattgtaacctttggatagtagctttgagaacagttcatggaaactgctatgattctgccattcagtttcttatgttatatattgccttaattgtcctatcatcctagcccgtaatatttattctgcttaaatatgtaaaaagaaactgtttgccatatgcctatggaaatctacgaagcttccagcaaaaatctagacaaaatgcttctaatggagcatgtgcatctcctgtggcttcacaagaaaggaaacatagccagatagtctactgtgattttcactggcttctctctaatttcagaccttgatgaatgtcaaacaaagcagcataactgccagttcctctgtgtcaacaccctgggggggtttacctgtaaatgtccacctggtttcacacagcatcacactgcttgtatcggtaagacaaagttacaaatgggaaattttacaaacttctagtagatgcataaaaattatatttaaaattataaacagaagaatgtcctggtatttatgttcagtaaccaataccccataatttgtggtctaaagaagttgctaataagatagatattttcaagaacaatatccaaagggaaaaaaaaggcctttttagtccaagcacctgcacagtagccatatttcaagcagtgcctttatatcacattcttaatgcaaccatggtgttcagacaaaatatgattaaaggctcactgtaatttagaacatgttaacaaacatattgagcttttattttagaagacacatgttaaggaactttagtcagtgtgccttcaatcactccaaaatatgctcaaatctcaaacctcttaaaatacactttttcttaccacttttgtctttaatatgacagtgaattttggtataaattttcccaaaatgccattttcacatcatgaaacttaggttttcatacattgctttttacttcccatgaaacgtaagacatgttatgattggaaagtttgacgctctgcttcttgatgctttgccagacaacaacgaatgtgggtctcaaccttcgctttgtggagcaaagggaatctgtcaaaacactccaggcagtttcagctgtgaatgccaaagagggttctctcttgatgccaccggactgaactgtgaaggttagttgatttgctcaaaaattcttaatctaataacagtaaaccatatatatttttaacttccaagacaaattggtataatctgaaaaaaagaaaaaaaagtattgaacaaaataggacccagcaacttattcctggtcataaatttctatgtatcactttggggacagagggaaacctaaatgcagtgaaacaaaaattctgtgattacgaattgacttttaaagtaactgttgactaatcatggatctgagaaagaattgaattgaaaaagaattctgtgcctaatatggtttgcggtagtgtacaagcataccagaaaaaaataataattggccttttgttccatgattcttaaatgtataagaattaaatataaaaagaatctgtcatcagagagaattgaacaaatgtactgaacacgctaaggtgaaatgatggctgtttctgttttttacgagtcaagctcccgcttcactccttcactttcttacagtggaccttggtctcctctgcaataactatttcctgtaaaatccaagggaacatttaagtggaaacaaaataagaacatgcttgcagttaagaaaatttcatctagttcttcactatttatattgcaagtggcagtgtatgacaagaaaaatgtattaggattagtgtcttataaacacccatgccagagattatgagactatatttatttcccttacattcttatatcgtattgcaatttatagttttcttgattttaatcacccttttaacattaactattcttagaaatatatgatttggatttctagaaatatatgttaagtatttaatttgctctctgtaaggcttgtggggcttttatatgtatctcattttcagcaaagaaaaattcagtttttaaaatgtcaattttaatattttatctttcaaatcgttgagacgttgaaagtattcttaacctacagctgtttgccacatgcgagttcagctcgtgaccatccccataagataccatttattaattatccatgtaaatttgttacacccctcagacatgccaattttattttactctttatggatagatttcaaatattcggttgtcattccaaaaaagcatacataaataaagaaattattccacatgtataataataccacatcttgtctaaaaataacatatttaaatacttaagagggatttgcatctaattaatcttgaatggtaataaaaatttttacgtgcaatataattgtactttttaggtatctctgtaatgcttctatcctcccaaaaatgaggattgtatctcagtcactttcaaacttactggactatgcaatgcaaatatattttatatatatatatatatatatatatgatttaccaaataaatcataccatttgcagttaattagttcaaaatgtacaacatttgtggttgctatggttgacttgctgaaattgagatgttatttagagcactgacatgccgtggtctggtggagagcagaagaatgagctggtctcttatctcagaactgttccctgcaccaccactgactaataaccatgtgacctggaaaaatgacagcctctctatgtgtcatgtcttgtttgtttgtttgttcccatgataacagttaccccaggtttcgtttggagtgcatttaaaaatagtagaagaaaggtgacataaaggttttgccgggcttgtttttgcagatgttgatgaatgtgatgggaaccacaggtgccaacacggctgccagaacatcctgggtggctacagatgtggctgcccccaaggctacatccagcactaccagtggaatcagtgtgtcggtgagtgctcttttcttccatcgcacttgcttttctcacctgaaagtgtctctgaataagatgaacaaattgtgagggttgagatttcagtatagcctttgaattttagactttaaacccagtccttaagactgatgcatggggactcattctgctagtgtgtatgtttgaaaatatctattaaaaaaaaagtttgtttttaagtaccgggaagttaacttaactagaggttacttcattttaaatatctgctaagtaattttaagtttctgaagatgatgtcaagaatcatcatctttgtttgcgaaggtcagccacttttttgtctgtaatttaatatatttagatttcccatccattcccctcatacgaatctaaaggagttcacatcaacttaatgaggacagtccatgtgtgctctcctgtcacatagatttaataaaggatgggaagtgttttaaggttgaaaaagtacctacttacagcaaatgctgttggcagctctagacagaagtgtttgtaaaataaaatacgtggctctcagctctgttccttgcattgataatagtcgctgaaattctccttttaaggagtgattgatcaaagagaacattattctctacttggatagccaggtgacttacttagcatatgcctaatttcttggctccttttgaatgcgcttcacagacactccaaccaacacattttgatgctaggtgctggcataactgagcagaaaggggcactgtggtcctgcagagaaatatcaggatgcttcctgtttctgtgtagtaattcaaattacttcacaggttattcacatattgaattattgtgatccactaaataaattagtctgattttatcctttgtggtcttctcaaaagaaatttctagtgacagctaagtgaattaagaacaaaaaatcaagataaatttcagtggagggaaaatcatgccaggtcaaagacagatgctttaccacaccacgaatatacactcataggagtgtagaaatgcagaaaccaataagtgatcaaaagttaaagacaagacagtttcaaaaaattatttaaattaccaattaggcagttattcaaaataactttataaatttaattcacttttttttcctcttcatagaaaaaaactgttgtagaactccttatgcccagatttattgattcataaacaaaggcaaagtgtatggcacactctttagaatatcagaaacagtattttttacatagctattaaaataatgtaaaacattctgtaggttgcctattcactctgatgatagtttcttttgctatgcagaagctctttagcttaattagatcccatttgtcaattttggcttttgttgcaatttcttttgacgttttcgtcatgaagtctttgcccatgcctgtgtcctgaatgatgatattgccgacgttttcttcagggattttttatttttttaggacggactctcgccctgttgcccaggctgaagtgcagtggcatgatcttggctcactacaacctccgcctcctgggttcaagtgattttcctgcctcagcctcctgagtagctgggattacaggagtctgccaccatgcccggctcattttttgtatttttagtagaaacggggtttcaccatgttggccaaggctggtcttgaactcctgacctcaggtgatccacccgcctcagcctcccaaagtgctgggattacaagcatgagccaccatgcccagcctcttctagggttttttatggtttagggttttaagtctttaatccatattgagttaatttttgtgtaaggtgtaaggaaggggtccagttttagttttctgcacatggctagccagctttcccagcaccatttactgaataggagatcctttccccattgcttgtttttgtcaggtttgtcaaagatcagatggttgtagatgtgtggttttatttctgaggtctctgttctgtgccattggtctatatgtctgctctggtaccagcaccatgttgttttggttactgtagccttgttgtatactttgaagacaggtagcatgaggcctccagctttgttccttttgcttaggattatcttggctatacacgctcttctttggttccatatgaaatttatggtagtttgatgggaatagcattgaatctataaattactttgggcagtatggccattttcacaatgttgattctttctatccatgaggatggaatgtttttccattcatttgtgtcctctcttatttccttgggcagtggtttgtagttctccttgaaaagattcttcatacctcgtttgctgtattcttacgtattttattctctttgtagcaattgtgaatgagagttcattcattgtttgactctctgcttgtctattgttggtgtataggaatgcttgtgattcttgcacattgattttgtatcctgaggcttcgctgaagttgcttatcagcttgagttttggggctgagacaatggtttgttgggtttttgttttttttttggggtggagtctcactctgtcgcccaggccggagtgcagtggcacgatctcagctcgctgcaacttccacctcctccctgcaacttccacctcctccctagtagctaggattacaggcgcctgccaccatgcctggttaattattattagtttattattattattattattattactattattattattattattattgtatttttagtagagacggggtttcaccatgttggccaggctggtttcgaactcctggcctcaagtgatccacccgccttggcctcccaaagtgctagaattacaggcatgagccactgcgcctggtcagatgatggggttttctaagtagagaatcatgatatctgcaaacagataaaatttgacatcctctcttcctatttgaataccctttatttcttctcttgcctgattgccctggccagaatttccaatactatgttgaataggagtgataagagaaggcattcttatcttataccagttttcaaagggaatgcttccagcttctgcccattcaatatgatattgactgtgggtttgtcataaatagctcttattattttgagatacattccatcaatatctagtttattaagtttttaacatgaagagatgttgagttttatcaaaggctttttctgcatctattgagataatcatgtggtttttgtctttggttctgcttatttgatggattgtgtttattgatttgcatatgttgaaccagccttgcatcaaagggatgaagccgactttatcatggtggataagttttttgatgtgctgctggattcagtttgccactattttattgaggattttcgcatcgatgttcgtcagggatattggcctgaaatttcctttttttgttgtgtttctgccaggttttggtatcaggatgatgctaccttcataaaatgagtcagggagtagtccctacttttcaattgtttggaatagtttcagaaggaatggtaccagctcctcttggtacctctggtagaattctgctgagaatccatctggtcctgggcttttttttggttggtaggctattaattactgcctcaaatttagaacttgttattggtctattcagggattcgacttcttcctggtttagtcttggtagggtgtatgtgtccaggaatttatccatttcttctagatttcttagtttatttgcatagagatgtttatagtattctctgatggtagtttgtatttctgtgtgatcagtggtgatatcacctttatcatttttttattgtgtctatttgattcttctctgttctttattagtctagctagtggtgtattttgttaattttttcaaaaagccagctcctggattcattgattttttggagggtttttcatgtctctatctctttcaattctgctctgatcttagttatttcttgtcgtctgttagcttttgaattagcttgctcttgcttctctagctcttttaactgtgatgttagagtgttgacttgagatctttctagctttctgacatgggcatttagcgctataaatttcccctaaacagtgctttagctgtgtctcagagattctggtacgttgtctgtttgttctcattggtttcaaagaactaaagagcttctgcacagcaaaagaaactatcatcagagtgaacaagcaacctacagaatggaagaaaatgtttgcaatctacccatctgacacaggtctaatatccagaatctgcaaggaacttaaacaagtttgtgggaaaaatacaaaaaccctatcaaaaagtgggaaaaggatgtgaacagacacttctcaaaaaaaaacatttatgtggccaacaaacatatgaaaaaaagctcacatcactgattattagagaaatgcaaatcaaaaccaccatgagataccatctcatgccagttagaatggctattattaaaaagtcaagaaacaatagatgctggtgagactgtggagaaataggaaaacttttacactgttggtgggaatggaaattagttcaaccattgttgaagacagtgtggtgattccacagggatctagaaccagaaataccatttgacccagcaatcccattactggatatatacccacaggaatatagatcattctactataaagacacatgcacacgtatgtttactgcagcactatttacaatagcaaagtcttggaaccaacccaaatgcccatgatagactggataaagaaaatgtggtacatatacaccatggaatactatgcagccataaaaaggaatgagagcatgtcctttgcagggacatggatgaagctggaaatcatcatccgcagcaaactaacacaggaacagaaaaccaaacaccacatgttctcatcataagtgagagctgaacaacgagaacacatagacgcagggaaaggaagggaataagcacatgctggggcctgttgggggttggggggcgaggggaggtaacctagaagatgagtcagtaggtgcagcacagcaccatggcacacttggctatgtaacaaacctgcacattctgcacatgtatcccagaacttaaagtaaaatttaaataaataaataaatataataataatataaaacaattttattatattacaatatttataaaatatgaagcccaccactttatttagtaaataccatggacttgttggttaattccatagaccttaatccaaaagaatgattctctatcaaacagaattttttttaaggagaacaaaagtagaaataggaaaatgcatggagtgccaatttaatttcaaagtgtttcagtttcctgaagtttttgtttctgaacacctagcacaaaacgagctgcacaggtttttactaaatgtggaagctctatctaaaatagtctgacttaaaatcaagatggtgtggtgtatcccagttcccctttatgagatcctggggtgagcactttgacaaggcagtcacccccaaaggagctcgcaatggagtccagccagaagccggtttgccttctaatcaggagaaactccatgagcagaggaataaatggtttaagatgagtccaaaactaaaaatacatgagcagatatccctaattgcaggtattaatttgtaagcttattctactaaaatgagtacctctaagcagcaggtgcctgggtacgacacatcagggatttatttcaaaagattctagattcttctgggcagggttgaggaatccagcttgtctctaataaaattgctgactttcttcccttgaattcatgtaacgccattagatttttaactcaaacatatggcagaaattgggtgaaataccccttcaggaaactaataaaagcaacaagttagcaaaagaattaggacaaaacgcaaattgaaaagccaccaacattttttatctgtcactacttgtgtgaatatcttcagccattcatatgattgatgggggaatacagaaggaagcatttcagacagatttcccccggaatcctcgtcagtggtcaacactgttagtcaatgcatcagacagtttaaacaggcaaaactgtaaacctacgatgttactaaacctgctaccaattgaagaagaatgaaagttctttgaaagtgttaatattgaaaaaagctttcagttcaaactaacactttaggaagttttctgccagttgtcacaaagaatttacaacgttctggtagatagagtgtacagatgtagggaacattctcaactatttgtaagcattagaattattcaaatacaattattcaaaattggaaatatgtaaatactaacatttgcatatgaagaaaaattatgtcttcatatatgaagactttgtgttttagtaacttccagttgcttctgtagcctgttcacaataattcacacatagttgagtgaggcttgaatcagttcaaagtatgtgtcagacaggaacatatttatttaagtctataaattttaatcatgatatacatttatagaatataaatatgaggtatatcatggtgcttgcaaaaatgttacatatttttaaatattcttgtaagtgatatgtttaaatataatttattcagttaattatttttgcctggtaatttttcttcctaacacaatgtctaatggtatattcatggcaggatcattttattaaattgtaatctaatttagattccctgttaggagagaaacactgcataggaatgtcagatctaattataaaagcagatgaggctttatggcagaattccaagtctcttgtatatagaaataaaatagcagttatagttacatcttatgtagccaagttactgagaatttatttatcgtatctacgttcttcccctgccataaaggctaagaattttcacatattagataatcagcatcttttatattcagtgattaagacacctacatttagtggtctcctttaattctgagactatcagaatcatgatacaaaaatgttcctaataatatctaccctttcagtaacttctgtcctgtacttaatgaagtttaattcctgtctgggaggcctcttcactgagagcccatgtgcatcttccaaatctcactgagctgctgcagatccctcgcttccccactaggtactatgtcctctgtgcacacccacttgcacatgggcctgtttccccacatgggctgaaatatatacttgtcacatattaggtaaacagacactctttgctccacatggagtcacaagaattgaaagaattccatggaacagatgtgatttgttcccagggtgaaatttggattataaaaaaagcccaaagaagtcaagccacatgctgtatatcaaccagacagttaaggcaaacttataatctccaaagttgaaagcataatcagactttgattttgtaaaaatgataatagtaactgaaagtataacctataattatcctgctaccaggtatttatagtataatgttagtcattaagcgagtaaaagctatagctggctgatggctggatgcaaacctgcctcagaaagcacagtctgcacccaatgggttctcaagcattttaaactgaactaggttgttcgttcaactgatttaactaaatagtgttgttttccatcgttttcatttagggtttataaatttttttatgctttctcctcctgtataatgaaggtttggggaattgctgggggaatggatacaaatacttatagggacttttttaattgatatatcataaacttctctcttttaaagtgtacatgtaaatgggttttgtagattctcacaaaggtatgcagtcatcaatactaccagtttccgaacattctcatcacctccaaaagaaacaccatacccaagagcggtcatttcccatttcttcctcccgacaggccccggcaactaattttctctctatctctaaggatttgcccgagatataagcttttgaagtaaccttctgttaagagaatagaagagttattcactaggcaaactgcaaatatctgttcccaagggctgcagacatatttagaaacagtacaaacagaaaagagcaaagcaagggttttttaaagccacaatttaggggaatttttttcattcacgtgctttgcaaatcagtcgtcagaataaaataaaatactgtgttagagttatttctgccataaaatcacaggcacttgagactccagacttgttcacgtttttgctcttgcctgcttccccgtgtaagagtttctttcttcgtttcactagatgagaatgaatgctccaatcccaatgcctgtggctctgcttcctgctacaacaccctggggagttacaagtgcgcctgcccctcggggttctccttcgaccagttctccagtgcctgccacgacgtgaatgagtgctcgtcctccaagaacccctgcaattacggctgctctaacacggaggggggctacctctgtggctgcccccctgggtattacagagtgggacaagggtaaggcggccttcagcctcagcacatagaggaatacatggttcctgagtgagttcaggccaccccccactgcagggaagagtacagtgtctaaaagccaaaccgcaaaagcattgattagaactcttcgggtatgcagataaataccaagaaagcacacacggactgtgctcagggtatagcattacttcctttgtgatgagcataaaacttgaacttgtatgtaaatatcactctttgctcctcttattaagggcctgaattgattcaatttgacccaaggccagagacaaacagatgcttaaaaatgcggctcacacgttgccatggatacctgggctgtgaggtagaagtggaaatggccttgccacaggttcttctacaaattctggaaggtgctagcatagtgatcactgaggaaggagtttgtccctttctttgctcatgtggctttcctatcgcacagagagaggatggtgcctagttggtgtggtgtcattcagcacgggcctgacccacaagacaggcttccctccaactaggcgcactgtctcaagttccatgggctgtggcagaggtgctggccatttgcattcttccaggaaggccgtggtgctcagtaacacagaagatgggcatttagaggtcagtccaggttgccttctttgaaaggagcagtgtgcaaggcagggactaaaaggcatggaccaagtctgtccaacaatggtgtatgataatagttaaaacaaaaggcttggtctacacaaaggtcatttagagccaattcattgactcactaaccaaaatataagttcagaaatctcagtttttaaagcagggagctttgttgcaagcagcaaatacaggcttcaggcccctgaaacaatggaacctgtcttagcattctctttggaaattcataccttacttttaccttctggagttaattatgctcagtacttcagtctaactaagattgaaaattgggaaagcatggggctcaccctcagaagaattttgctgtttcaaaataagggaaaagtttatctattgtgtgttaaagaattataggggattgtggctcatccctgcaatcccagtactttgggagtccgaggtaggagaatcgcttgaaggcagaagttggagaccagctagggcaacatagcaagaccctatctctacaaaacatgaaaattaaaaaaaattagttggatgtggtggtgtgtgccggttgtccctgctaatttggaggctgaggcatgaggagctcttgagcccagaagtttgaggctgcagtgagcaagatcgtgccactgtactccagcttgggaaacagagcaagaccctgtctctaaaagaaaaataaaagagttgcaaagaatattagggttttatgtttatgagtttagtgtttgctctgttggtttcgtgtttctgaagagtctgctctaccactggaaaactatggtcaagtcagtgataaagtctaacaatactttgctttttgcaaatagccactgtgtctcaggaatgggatttaacaaggggcagtacctgtcactggatacagaggtcgatgaggaaaatgctctgtccccagaagcatgctacgagtgcaaaatcaacggctattctaagaaagacagcaggcagaagagaagtattcatgaacctgatcccactgctgtgagtatatcccactctgtgttgccacaaaattttatccctacggagtcatgtatacagtgcagttcacgtcgttttcagcctcactgaagttaatcataccttgaatttaatggataaattaatggacccagtatggaaaagacaagtaaattaaagtgattgaattattagatcaaaacacaaagcttgggagaaaagactttaagattcacagtttcagagcattttctcttgttgtagtttttgatttatgtgggagggtatgtccatctcgggaagagctatttttacatgattcaaaaaatgaaattatttttaatttgttcagttctgttttataaatgtatagcatacaaggctgattttaattttcactagggaaaccaagtaggtctcatattctttgttttatttttaagacagttgttccttcattaagaagttttgtcttccaaatcacttgtattctttaaggaactgaagttggaaattgcgagccactgatatttcctttccctaattgcattttggcagtgtttaaaggggtgggctgcagactacctggttttgaacgtaactccctggccctccctatctgttacctctgttacatagtttgtgtttatttaacttctctcaacctcagttttttcacctgtaagatgggaataataatacctctgaaggctgatggaagggttaattgaattgaaacatgtgaactgcctggaacaatgcctgacatatatatcacatgtgttcagttcctatgaatgattaatatctcatatctagagatcttgatgattttcccaaagatctgagacagtatgaggtcgtcactcaccactctctgcagttaatatgactgagaaattaccccaccaaaaaacctaatcaacaactggctggctgtgtgaattggacaacttgcttcagttttttgggcctcagaatctttgtctatatgacctgacttgtctagccaaaaagttcatgatgctattttataataataaataagccagtgttacatttaccttaagtagactaagatacccaactgatgtttgacagttgagatattcatcaagttcccaaactacaaatccagaagttctgcttataaactttcccattggggtactaggacataattctgcctgaacactgatgggcacttctgggtcaccactgccaagtcctcacttaacagatgcccaatcaaagcattgtggtttttatcctatcttactttgatatatttgtgctcctcccaaccctctgagcaaaagtcagacttggtttatctgggccctgccccactggcttttaccaaagatgctggtttgaactggagccctgagaactctgcagatcactcactctgtgtacctctgatagctcccagtaaactcactcatcattcacttaccttacaaatcaaagcccagctttcagacagaagattcccctgggcgcattccctgctgatgcccaacagcagtacttcttattttgactccagaaaaaaaaaaatcattacctaaattttagtttttaaaaattattaattagcacaatatttcataaactcatcaaaaaaaacttgaaatgggaacactctgtaagcccagtcctgtacctttaattaccttgttaaggctgagtgagaagtcctaaagatttacagggtattctcgatggaattggccttttcttccaactgacaaaaatgtacaatagcctctttcacagccactgctggtaaggagagtgcagaaagcgggagtgggaagccacagcctgtcctcgtgaccaaagcccctgcagctgatctctttctagtcctctgcttgtgctgtagaagcttgtcccaaatcatttcctgttcttcctccaggttgaacagatcagcctagagagtgtcgacatggacagccccgtcaacatgaagttcaacctctcccacctcggctctaaggagcacatcctggaactaaggcccgccatccagcccctcaacaaccacatccgttatgtcatctctcaagggaacgatgacagcgtcttccgcatccaccaaaggaatgggctcagctacttgcacacggccaagaagaagctcatgcccggcacatacacactggaaatcactagcatccctctctacaagaagaaggagcttaagaaactggaagagagcaatgaggatgactacctcctaggggagcttggggaggctctcagaatgaggctgcagattcagctctattaacccttcacagacttgggcccaggctcaaatcctagcacagccagtctgcagaagcatttgaaaagtcaaggactaattttaaagaggaaaaataataataactcttgtttctttcctccctgtcttagactttgaatgttgaccctcacagggagggataatttagactctggtatggccaaagatttgagcacaaaggcaaccgtggttactgtattttttatataacttcattttaaaatatattaaaagaaacctaaatgttcaagatatcagcatatggcactaaatgcacaaaaataatgtgagctttttttttttttcctgttagcagtctgtaacactttgggtattttgctatagttgctaattaaaaaaatatagatgtttatttatttttaatgcagtaatatatggagaaatgaacaaactatgtaaacaaaaagggaaactcacttgtttttctttagatttataaatttgagctattttttttagaggtgctttttaaaaatccaatagatacaagagatgtttcctttggttttctgccagtcatccagctgatacacacctgatgattttaaagaaagccacacagagctgaatgggcagtgtaatcaataatttaaaagacatgaatgtcattagatcctttataacgtagatcgaagccaaagcagctcatttgtgacaacatttcatatcaccagacacaccaggcaacagaagttgaagcacaaccactgtagcaaaataccttgactgcttgtgagaccattagcattgcaggccaaaccgtactgtatttccttctcataacctcaaggaaccatatgtgctacccacaacacctcattcttacccagggtgcgctgcgtcctcatggtactgtaggcagctgaagaaccgccgttcccttgaaagggaacacctggcattctgtggtgtttcgtgctgtcttaaataatggtgcatttattatgttcaagttatttcaggattgccatatgtgcaaacaaatcatgcaatgcagccaaggaatatatgttgttgttgttgttttaaacccattttttttttagaattttcattaatactgtagttatacaccatatgcctcattttatcatagcctattgtgtatgaaagatgtttgtacaatgaattgatgtttagtttgctttagtcatttaaaaagatattgtaccaggatgtgctattaagagcacgtatccattattcttctcaacccaagaacctgtttcctggaccagtgaccaaacctcatatgtgaaatggccaaagcacatgcaggctcctggttgttcctctcaaacctgtgctgaccaaagattagtaaccagttatacccagtattttgaggttttattgtttttttaataactaaaaagaaaaaaggaacagtgtaaatttgtaatcaagagtttgtgaggaaaaacttatggtttttggttttgtttgtttttgtaggtctgtgtatcaaatatgacacttttcttgcaataaagcttattttggggtatttttctgactgaaaattttatgagaccacaacgcctgttgtatttgcgggaggggctgggggctttgtctatgggaacctgtattgaagtaataatagagagccagacacacaggaaaataaaggaatgctggcaaatctgtgaagcaaagtcaacatgtgttcaactgatgattatgatttgaagttacattcaaatagaaggacataaagtcatttacttatgcataaattctaagcttcctgggacccatctttctggaaacttcaaagaatttcttcacttcatgctaatgcccccataaagtatccatgaggaagtgaaacattcttttagagaatcttacttctctaaggtagaaatttcctgaacccaagtttttaagcaaaggtaatagcgggcataccccaggccaaaaggcattttcaaaaataatctaaaccttatctcttaaaatggtatacagtttattcactggagaagtggatagatttaacaaagtatttagcatgaactcccttttgatacactgccaaaacaggcacagaaatgtttccaagactcttagagattaatttaatacatggtttaagaatttatgcgcttaaattttttatccaaggaataagtaaacaaggaaatattgtgactgatcttagtgctgttctttgccaatcagaaattagctgcatggagtaagaaaagtatttgcctcaaggcgttctttaaaacttaacatgcatattcagtttcatctggcatctattattggtacagcatgagtattgtaatatgaaattacctggaaccaaatttgactctagccttgaaagttgagcaacaacatttaatttacctttaactggctcttaaagaagtttgagaatccacatctttaggtgctttacgtagaagataaaaaatgatgaggggtttaagagaagaatgaagtagaaggaaatgaccactgcaagacactccttccaggaggaaatgtctcaggtacctttggtagctttgttgccatttttttactgtgaacactgacaaaatcagaatgaatttgtctgtctcataacgaactgctaatgacattttctgcactattttgtcattcccatgaatgtcccatttgctccagaaactaccttggctaagttatagaaaaccttgcaggagagaaaggtgtgatgtaagcccaaacacataaaccaaatccactgggcatatgtattagttaataagtaataatttggtctttagctgacatgaattctgtttctacttgtatttaaatttggagctttaaaaaatgtagctctatttagtaccttttgctttcgctacttgtagtagataaaagttggatatttttgcacgtgaacattgaatgaaattcagggacaaaacgtttagagttacactaaattcaaacatcttcctttttgcattatctaggaatactaaacaggataattcatacagtctttctcttttaaatactttagggttttattttgcattaattgccttcctggttcagagaataaacgtgtggggttgaggatgggaaatacactaaaaattatagagcatcagtctactagagtcctacaaacctttaggggaacaaggtaattcatatattaattgaagcatatgaatttgctgttatttggccatgtttaacctacaaaatggcaattgtatgtggttcaatttaatagttcagaaatacattcctcgagaattgactggaaatctgaatacatcttttctcttcaaaagacagtaacccattcactccttgctatgccattgttggctcatttgtactcctagtttacaatagtccacaagaacataatttattcaaacaaccactttctttcaagctccaaaacactggaaagagtctaaatcacacacctttgcgacctcaatggtattatggaagctgttcaaagacaaagacaagtccattgggaaaggttggaatacagcacaatgttttgtgtttttttgtttttgtttttccttttaaaaactaaaggaaaaacttgaggaacttttacttcttgagagagacgaaaagttggagattcattgctacccaacaggaagtaagggtgtcaaccatgtctgcaatctcatcccagcctccatttttttttaaaacacgtttgctttctcaaatagatacaaagccatggttttcttgatcaataagaagtacatgtttctgatctcacctccttcaaaattatttcagtgtacagagcagtggagtcctaaaatacaatgtgacgaaagttctctgaaaaggaatttgaagaaaagagactttataccagtgaacagtttgcaaactgagaaaatatagtttcagtgtgaaacaaaggtgtgttccagaaaacaaagagaagattcagattttagagcaaaaggtcatgcccaggttcccaatcaggttcatttatgcaaatgaagtattcaaaattgcttagttctgactggttgacacagttgagtcctgatttgtcaatatagctgagccctgattggcggtggggacaggtgagctctgaatggttggtttccaacccccaaaccagaagtctctgtcagatgcttctttcaaagggttgatgggggcagggtttctggccacaggttattttggcacctacaaggtatcctgtctgtgtcagatgttttgctaagctaaattaaatgatgggtgttcattaaatgtctagatcatttccaggcaagatgtaattccctgtatgccctggctgacagaaagcatggattacccatggattccccatgactaactgaagtgagttaaaacagaaccaggcagctgtggctgggtgaaggactggtcatgtactttgtgttcttagaaagatgtaaatgtatcacaggacctccctgtctacaatcaagccaaaccagtttccgttgtaggtgccaagataaactgtggccagacacttggtccctcctggccctttgacaaaagcatctgacagagacttctggttttgagcttggaaaccaaccaatcagagctcatctaccctggccaatcagggctcagctgtattgaccaatcaggactcaattgtgttgaccagtcagaacaagtttgaatacttcatttgcaaaaatggtcctcactgggaacctgagtaggaccttttgctatatcaaatctgaagcttctctttgtgctctggaaccaccttcatgttacaccaaaagctgcatcttcccagtttgcagattgttactggaataaagtatctcctccaaattccttttcagagaatttttattcatatcattcaattcaattcaatcattcaattcacccactcaggcagtattatcttgtagttaaaagaaaaaactttcaaatcagtcagacctgaatttcaattccgtctccttggacaagttacgtaacttttctgagacctggtttctttcctaggatgatctttccttacactgtggctgagaggattgaatgagatagtacaggcaacgccattagcatagggcccaagcagatagcacacattcagtaactgtcagctgctcttcttcctccttctactcctcttactatcatcactattagaagaatgagctcacatatccacacaaagctcctttctaagcatggcctggaactactgctttctcatggaattgtaggaacaaatccagataaatggcaaccaggaaaattttctaagtgctctgaacctttagaagtcctggtgtggtcatgagcgtttatcgtctccacatcactctgcccttaacagaattgtgggcgacagcccggaaaggtcaagctacaaatgcagcgggagccctcccgtctatagacctccaggaaaccaaccaataaggagaatatgggcatctgatcatccctttgaggtgatttagtgctgttgaatgtcagcactagaaaggcctttagagagccggcacagtggctcatgcctgtaatcccagcactttgggaggccagcgcaggtggatcacttgaggccagtcattcaagaccagcctggtcaacatggtgaaacctcatcgttactaaaaatacaaaaaattagccaggaatgatggcaggtgcctgtaatcccagctactcaggaggctaaggcaagagaatcgcttcaacctgggaagcggaggttgcagtgagctgagatcacaccactacactccagcctgggcaacagagtaagactccatctcacaagcaaaaaagaaaggcctttagaagtccaatcctgtttataagtttaaaagtggggaaagtaaggcccagagttgtaacatagttcattgcaaagctagtttctatcgaggtgaggcgagaaccctggttgcctagttgcagtctggttctattcatatttctactacgtggtaggcctatttggatctcttctaaaccctaagatataggccagttcccatggttttggctcatcttgaatccaaaaatattttccaagcacgatccaagcactgctttttgttttgtctctcccactgtctgtgtaactgctcccaatcttataaaccagagatttgtgtatgcactgaaatgccaaaatattggcggctacatagtagaccccaccccaatcctgtacttctgtaaatacatattacagccctggctctcaaagggttaaatgttttatttaaaccagaccttcaaaactttaaaaacacttacacatttgttttactaagaatgcttaaggaaagtacactagttgcttgtgttgcttaattgtcattttttttccttttcctgagagccttaaaaaagatattactagattaagttggcttactttcgaaatagccaagaaccaacagctcccattagtcactcccattagggctgcagcttaaatgtcaggatgtagtatagacattttccaaaagaaaacaggaaaatgctttacatgatttttagagcaagctatggggaaagttaacattagtagcctttgccagacaactactgctacacgtgtgagttccattgatgaaataacagtagaagctgtgaatggccagttcctaaaaatgtgccaaaaaaaaaagtaggcttttggtctgtttaagctgcctgggtttccaccctaaggccacccccttccttccactctacctgacctcagcttccctacactgatggaacctgctcctgtaggagtggatttagagcctcaggcttgtgcatttgtgatcttcaggcctaaggcagggtcctaagacccatgaccatgtactagaacctgggacttcaccctgttatgaacctgtaaacttcacagagccaaggccagaaaatactccatgaatgaatgaagggagggagaggattctgactctctgcagagtggagacttatggaccagcacaggaaattggaccttgtccaaggagtgggtggtatcatagtcatgattttactggaaaccctcagaacaggtttctggagatcatcatggaggtatcttcccgtcttctaggaggactttcttgatttattctgcttttctccacttttctagagagccccttaggtctcccccagggtgagagcagattgaagaagctgttgaggcaagctggctgcaatcttgacttgtcccattaggatatccttgatccaaacctggactgaggttcatgctgcttctgtagaagtctgggtttgggaactggtacagtaatttttcttcgaagagacattacacagttcttatttctggaacaacttgattaaatgagcatctgttgggtattacacagacctaaaatgattttccctccaaaaccttacaaataattcaaagaaacaagcaagacagccacaaagaaacaagataaccacatgttataagatggtgtgtgcttaagggccatagtggatgtctcagacaaatggcccagactcttggaaaaggagtggtcagtgaaatgcagacttgtgggagatttcctggaaatgctgggacttgagctggatcttgtagaatgagacagtttgggatacgtggcaaagagtaagaaggaatttcccaaaagatagaatagcatgaacaaaatgttgtaagtcataatgtgaatggtatattggaacacaaagaagagttaaatccatgggtctgccgggtgcagtggctcacacctgtaatcccagcaatttgggacaccaaggcgggtggatcacttgagactaggagctccagactagcccagccaacatagcaaaacccatctctaataaaaacataaaaattagccaggcgtggtggcacacgcctgtaatcccagctactcaggaggctgaggcaggagaatcacttgaacctgggaggcagaggttgcagtgagccaagatggtaccaccgcactccagcctggacaacagagccagaccctatctcaaaaaacaaaacaaaacccatgggccttaactgatggtaccatgaaggaaaaagatgattaggaagggtaaggcccaggtatgaaggacactgaaggacatcctaagccatttagactttatcctgtagtccgtagctaatgacgaatcattggtgtatggctgagaattgattaagaaaagacgatctagaaccaaggcctggcaacttcccacatctagaaatacaaaaggagatttgtcacaacttctgagagagagagaaagtaaagaagtagtagtaaaatcagaagacagtggtgatgtcaaggatgcctagatagaaaggtattagtctgttcttgtattgctataaagaaatacctgagactgagtaatttataaagaaaagacatttaattggtttatggttctgcaggctgtataggaagcatagtggcttctggggaggcctcaggaaactttcaatcatggctgaagggatagcaagcatgtgttacatggccggagcagagcaggaggaagagagagaggaggggaggtgccacacctattttttttcttttttttcgagacagagtctcactctgttgcccagaccagagcacagtgatgtgatctcggctcaccacaacctccgcctcccaggttcaagtgatcctcctgcctaagcctcccgagtagctgggattacaggcatgtgccactgcaaaaggccaatttttgtatttttagtagaaatggggtttcaccacgttggccaggccacacacttttaaataagcatatctactgagaactctatcacaagaacggcaggagggggatggtgctaaaccattagaaaccatccccatgatccagtcacctcccaccaggccccacctccagcattggggattacgtttcaacatgagatttgggtggggacacagatccaaaccacataagaaggcatttggggaaagcatcttgaaaattttttgctagtaaaatgaaatctcctttcccaaccatatctatttctcacgcccccccaatcttcatctcttccttcactttagtcactttgttgcgagcaatgacagaacagtgtacatgattcttgcccataaattaacatgaggggtagcatgggaaaggagggaaaaagtgtagcctttggggcaaagaaacaatagggtttctatcctggatgccactcaattgctgtgtggtattagtcaagttatgttcgattttaagtattttttttttaacaacataccaccagttttgttttgggtaattactcaccaccattacataaagtcatactaggacttaagagtttctgctctcctgggttggatttctgtatccctgaaatttgaattttgagcagaataatacaagagcagataacagatcttgcattcatccaagcagcaccctaatcaaactatgagtcagttcttgcaatctagaccccagaagctgacccattccatcttctttctaagcctgatttttcagtttttacaaaattatctgagctatcccacatccttggaatcaattacttttattgtcaaaataagttgttgcttacatccaaaaaactctaaacaatatctatcctacattaggattgttttgaggtttagaaatacaggatactctggcggggtgcagtggctcacgcctgtaatcccagcactttgggaggccaagaagggcggattacctgctgtcaggagttcgagaccagcctgggccacatggagaaaccctgtttcttctaaaaatacagaattagcctggcatggtggtgcatgcctgtaatccagctactcaggaggctaaggcaggagaattgcttgaacctaggaggcggaggttgtggtgagccgagatcacgccattgcactccagcttgggcaacaggagtgaaactccatctaaaaaaaacaaaaaaacccaaaacaaaacaaaacaaaaacaaaaacaaaacaaaaacaaaaaaacaagaaatatagaatacgcccaccctcccaacatggggcctagaatatagcgtcatacaacagactgatagcttctctattgatgtcacgaaggagccctgaattttccccagtcccgtctcctgtgtcccctattacggtgaataactaagccaggatcgttctgcagttcacaagaattttgtcacctttatttattatttcttgcatcctccccaactctagtttgggaaggatggagttaggaaaggctgcgctggacttggtcccaggagaggtaaaccatagcctggcctcttgtttctggagcacatgctggagaaaggtggtctgttctgccagggagcttgctctttacatttcacaaaggacctaggaaaacagccgagagaggaaccactcattagccccaaggattacgcccaacagtcccaagaagggtcaaaatagcccagctaagtaggagaaaaataaatcaaatgctgtagctttatgtcagccacttgaattagttggatttctttccatgctatcatcctttgctcttcctgcaataccctgctaaaccattccatgggctgattgagtacatgcatgtgaagctttatgtggaataaataattacacaagacatttttggaagaataaatgcatttggcctaggaaaaccaattcgcatcttaaagagccagcttctccaaatgccagttctgtcagctaaccttctccagcaacctggcggtttaattcttcacccttgtctccttggccacactacacacgaatggttttcagagtagggaaaaaatgctttccggtgtctgttttaaatttgtttctatctactttatgtgtctaactttgtcctcgtatttgttttacagcaaaaacaaaatagaggaaagatatcaaccatatccccaaaagtttatacaagttactttttgctgttggtaataaaagcaattctgttttatagcatagatcctgtccataaactacaaacatccacttccctcacttccttcaaatctctttcgagggctgatgaagggatagccagtgacattgtgaaggtccctcagggtccttctaatagcaggcatttctatacagtctatctgtgggaccacagaggctgtgaggaatctaatcgcccactcagtctttgaaagagggaaatgaaaacacactttgatcagagaaagccaggatgaggagatgtttcccttagcccagtcctgattccatctgttagctgctgctaccttacaagccctaaaacaagtcatgcctcctcatataacatatataccggaatatgagacaacctcaagtattttcccaattgagacta

SEQ ID NO: 1112 - DNA, 10150 bp, Homo sapiens
atggggagaagacggaggctgtgtctccagctctacttcctgtggctgggctgtgtggtgctctgggcgcagggcacggccggccagcctcagcctcctccgcccaagccgccccggccccagccgccgccgcaacaggttcggtccgctacagcaggctctgaaggcgggtttctagcgcccgagtatcgcgaggagggtgccgcagtggccagccgcgtccgccggcgaggacagcaggacgtgctccgagggcccaacgtgtgcggctccagattccactcctactgctgccctggatggaagacgctccctggaggaaaccagtgcattgtcccgatttgtagaaatagttgtggagatggattttgttcccgtcctaacatgtgtacttgttccagtgggcaaatatcatcaacctgtggatcaaaatcaattcagcagtgcagtgtgagatgcatgaatggtgggacctgtgcagatgaccactgccagtgccagaaaggatatattggaacttattgtggacaacctgtctgtgaaaatggatgtcagaatggtggacgttgcatcggacccaaccgctgtgcttgtgtttatgggttcactggtccacagtgtgaaagagattacaggacaggcccgtgtttcactcaggtcaacaaccagatgtgccaagggcagctgacaggcattgtctgcacgaagactctgtgctgtgccaccattggacgggcgtggggccatccctgtgagatgtgtccagcccagcctcagccctgccgacggggtttcatccccaacatccgcactggagcttgccaagatgttgatgaatgccaggctatcccagggatatgccaaggaggaaactgtatcaatacagtgggctcttttgaatgcagatgccctgctggtcacaaacagagtgaaactactcagaaatgtgaagacattgatgagtgcagcatcattcctgggatatgtgaaactggtgaatgttccaacaccgtgggaagctatttttgtgtttgtccacgtggatatgtaacctcaacagatggctctcgatgcatcgatcagagaacaggcatgtgtttctcgggcctggtgaatggccgctgtgcacaagagctcccggggagaatgacgaaaatgcagtgctgctgtgagcctggccgctgctggggcatcggaaccattcctgaagcctgtcctgtcagaggttctgaggaatatcgcagactttgcatggatggacttccaatgggaggaattccagggagtgctggttccagacctggaggcactgggggaaatggctttgccccaagtggcaatggcaatggctatggcccaggagggacaggcttcatccccatccctggaggcaatggcttttctcctggcgttgggggagccggtgtgggggccgggggacagggacctatcatcactggactaacaattctgaaccagacaatagatatctgtaagcatcatgctaacctttgtttaaatggacgctgtataccaactgtctcaagctaccgatgtgaatgcaacatgggttataagcaggatgcaaatggagattgtatagatgttgatgaatgcacatcaaatccctgcactaatggagattgtgttaacacacctggttcctattattgtaaatgtcatgctggattccagaggactcctaccaagcaagcatgcattgatattgatgagtgcatccagaatggggttctttgtaaaaacggtcgatgcgtgaacacagatggaagtttccagtgcatttgcaatgccggctttgaattaactacagatggaaaaaactgtgttgatcatgatgaatgtacaactaccaacatgtgtttgaatggaatgtgcatcaatgaagatggcagcttcaagtgcatctgcaaaccaggatttgtcttggctccaaatgggcgttactgtactgatgttgatgaatgccagaccccaggaatctgcatgaatgggcactgcatcaacagtgaagggtccttccgctgtgactgtcccccaggcctggctgtgggcatggatggacgtgtgtgtgttgatactcacatgcgcagtacctgctatggaggaatcaagaaaggagtgtgtgtgcgtcctttccccggtgcagtgaccaagtccgaatgctgctgtgccaatccagactatggttttggagaaccctgccagccatgccctgcaaaaaattcagctgaattccacggcctttgtagtagtggagtaggtatcactgtggatggaagagatatcaatgaatgtgctttggatcctgatatatgtgccaatgggatttgtgaaaacttacgtggtagttaccgttgtaattgcaacagtggctatgaaccagatgcctctggaagaaactgtattgacattgatgaatgtttagtaaacagactgctttgtgataacggattgtgccgaaacacgccaggaagttacagctgtacgtgcccaccagggtatgtgttcaggactgagacagagacctgtgaagatataaatgaatgtgaaagcaacccatgtgtcaatggggcctgcagaaacaaccttggatctttcaattgtgaatgttcgcccggcagcaaactcagctccacaggattgatctgtattgacagcctgaaggggacctgttggctcaacatccaggacagccgctgtgaggtgaatattaatggagccactctgaaatctgaatgctgtgccaccctcggagccgcctgggggagcccctgtgagcggtgtgaactagatacagcttgcccaagagggcttgccaggattaaaggtgttacgtgtgaagatgttaatgagtgtgaggtgttccctggcatttgtccaaatggacgctgtgtcaacagtaagggatcttttcattgcgagtgccctgaaggccttacgttggatgggactggccgtgtatgtttggatattcgcatggagcagtgttacttgaagtgggatgaagatgaatgcatccaccccgttcctggaaagttccgcatggatgcctgctgctgtgctgtcggggcggcttggggcaccgagtgtgaggagtgccccaaacctggcaccaaggaatacgagacgctgtgcccccgcggggctggctttgctaaccgaggggatgttcttactgggcggccattttacaaagacatcaatgaatgcaaagcatttcctgggatgtgcacttatgggaagtgcagaaatacaatcggaagcttcaaatgccgttgcaatagtggctttgctctagacatggaggaaagaaactgcacggacatcgacgagtgcaggatttctcctgacctctgtggcagtggaatctgcgtcaatacaccgggcagctttgagtgcgagtgcttcgaaggctatgaaagtggcttcatgatgatgaagaactgcatggacattgacgaatgtgaacgtaaccctctcctttgtaggggtggcacctgtgtgaacactgagggcagctttcagtgtgactgcccactgggacacgagctgtcaccatcccgtgaggactgtgtggatattaatgaatgctccctgagtgacaatctctgcagaaatggaaaatgtgtgaacatgattggaacctatcagtgctcttgcaatcctggatatcaggctacgccagaccgccagggctgtacagatattgatgaatgtatgataatgaacggaggctgtgacacccagtgcacaaattcagagggaagctacgaatgcagctgcagtgagggttatgccctgatgccagatgggagatcgtgtgcagacattgatgaatgtgaaaacaatcctgatatctgtgatggcggccagtgtaccaacattcctggagagtatcgctgcctctgctatgatggcttcatggcttccatggacatgaaaacatgcattgatgtcaatgaatgtgacctaaattcaaatatctgcatgtttggggaatgtgagaacacaaagggatccttcatttgccactgtcagctgggttactcagtgaagaaggggaccacaggatgtacagatgtggatgagtgtgaaattggtgctcataactgcgacatgcatgcctcatgtctgaatatcccaggaagcttcaagtgtagctgcagagaaggctggattggaaacggcatcaagtgtattgatctggacgaatgttctaatggaacccaccagtgtagcatcaatgctcagtgtgtaaataccccgggctcataccgctgtgcctgctccgaaggtttcactggtgatggctttacctgctcagatgttgatgagtgtgcagaaaacataaacctctgtgagaacggacagtgccttaatgtcccgggtgcatatcgctgcgagtgtgagatgggcttcactccagcctcagacagcagatcctgccaagatattgatgaatgctccttccaaaacatttgtgtctttggaacatgtaataacctgcctggaatgtttcattgcatctgcgatgatggttatgaattggacagaacaggagggaactgtacagatattgatgagtgtgcagatcctataaactgtgtcaatggcctatgtgtcaacacgcctggtcgctatgagtgtaactgcccacccgattttcagttgaacccaactggtgtgggttgtgttgacaaccgtgtgggcaactgctacctgaagtttggacctcgaggagatgggagtctgtcttgcaacaccgagatcggggtgggcgtcagtcgctcttcatgctgctgctctctgggaaaggcctggggaaacccctgtgagacatgcccccctgtcaatagcactgaatattacaccctgtgtcccggaggtgaaggcttcagacctaaccccatcacaatcattttagaagacattgacgaatgccaggagttaccaggtctctgccagggtggaaactgcatcaacacttttgggagcttccagtgtgagtgcccacaaggctactacctcagcgaggatacccgcatctgtgaagatattgatgagtgttttgcacatcctggtgtgtgtgggcctgggacctgctataacaccctgggaaattacacctgcatttgcccacctgagtacatgcaggtcaatggaggccacaactgcatggacatgagaaaaagcttttgctaccgaagctataatggaaccacttgtgagaatgagttgcctttcaatgtgacaaaaaggatgtgctgctgcacatataatgtgggcaaagcctggaacaaaccttgtgaaccatgcccaactccaggaacagctgactttaaaaccatatgtggaaatattcctggattcacctttgacattcacacaggaaaagctgttgacattgatgaatgtaaagagattccaggcatttgtgcaaatggtgtgtgcattaaccagattggcagtttccgctgtgaatgccctacaggattcagttacaatgacctgctgttggtttgtgaagatatagatgagtgcagcaatggtgataatctctgccagcggaatgcagactgcatcaatagtcctggtagttaccgctgtgaatgtgccgcgggtttcaaactttcacccaatggggcctgtgtagatcgcaatgaatgtttagaaattcctaacgtttgcagtcatggcttgtgtgttgatctgcaaggaagttaccagtgcatctgccacaatggctttaaggcttctcaggaccagaccatgtgcatggatgttgatgagtgcgagcggcatccatgtggaaatggaacttgtaaaaacaccgttggatcctataactgtctgtgctacccagggtttgaactcactcataataatgattgcctggacatagatgagtgcagttccttttttggtcaggtgtgcagaaatggacgttgttttaatgaaattggttctttcaagtgtctatgtaacgaaggttatgaacttaccccagatggcaaaaactgtatagacactaatgagtgtgtcgcccttcccggctcttgctctcctggtacctgtcagaatttggagggatccttcagatgcatctgtcccccagggtatgaagtaaaaagcgagaactgcattgatataaatgaatgtgatgaagatcccaacatttgtctttttggttcctgtactaatactccagggggcttccagtgcctctgcccccctggctttgtactatctgataatggacggagatgctttgatactcgccagagcttctgcttcacaaattttgaaaatggaaagtgttctgtacccaaagctttcaacaccacaaaagcaaaatgctgctgtagtaagatgccaggagagggctggggggacccctgtgagctgtgccccaaagacgatgaagttgcatttcaggatttgtgtccatatggccatggaactgtccctagtcttcatgatacacgtgaagatgtcaatgagtgtcttgagagcccaggcatttgttcaaatggtcaatgtatcaacaccgacggatcttttcgctgtgaatgtccaatgggctacaaccttgactacactggagtacgctgtgtggatactgatgagtgttcaatcggcaatccgtgtggaaatggtacatgcaccaatgttattgggagttttgaatgcaattgcaatgaaggctttgagccagggcccatgatgaattatatcaacgaatgtgcccagaacccactgctgtgtgctttccgctgcatgaacacttttgggtcctatgaatgcacgtgcccgattggctatgccctcagggaagatcaaaagatgtgcaaagatctggatgaatgtgctgaagggttacacgactgtgaatctaggggcatgatgtgtaagaatctaatcggcaccttcatgtgcatctgccctcctggaatggcccgaaggcccgatggagaaggctgtgtagatgaaaatgaatgcaggaccaagccaggaatctgtgaaaatggacgttgtgttaacattattggaagctatagatgtgagtgtaatgaaggattccagtcaagttcttcaggcactgaatgccttgacaatcgacagggtctctgctttgcagaggtactgcagacaatatgtcaaatggcatccagtagtcgcaatctcgtcactaagtcagaatgctgctgtgatggtgggcgaggctggggccaccagtgcgagctttgcccacttcctggaactgcccagtacaaaaagatatgtcctcatggcccaggatatacaactgatggaagagatattgatgaatgtaaggtaatgccaaacctctgcaccaatggtcagtgcatcaataccatgggctcattccgatgcttctgcaaggttggctacaccacagacatcagtggaacctcttgtatagaccttgatgaatgctcccagtccccgaaaccatgcaactacatctgcaagaacactgaggggagttatcagtgttcatgtccgagggggtatgtcctgcaagaggatggaaagacatgcaaagaccttgatgaatgtcaaacaaagcagcataactgccagttcctctgtgtcaacaccctgggggggtttacctgtaaatgtccacctggtttcacacagcatcacactgcttgtatcgacaacaacgaatgtgggtctcaaccttcgctttgtggagcaaagggaatctgtcaaaacactccaggcagtttcagctgtgaatgccaaagagggttctctcttgatgccaccggactgaactgtgaagatgttgatgaatgtgatgggaaccacaggtgccaacacggctgccagaacatcctgggtggctacagatgtggctgcccccaaggctacatccagcactaccagtggaatcagtgtgtcgatgagaatgaatgctccaatcccaatgcctgtggctctgcttcctgctacaacaccctggggagttacaagtgcgcctgcccctcggggttctccttcgaccagttctccagtgcctgccacgacgtgaatgagtgctcgtcctccaagaacccctgcaattacggctgctctaacacggaggggggctacctctgtggctgcccccctgggtattacagagtgggacaaggccactgtgtctcaggaatgggatttaacaaggggcagtacctgtcactggatacagaggtcgatgaggaaaatgctctgtccccagaagcatgctacgagtgcaaaatcaacggctattctaagaaagacagcaggcagaagagaagtattcatgaacctgatcccactgctgttgaacagatcagcctagagagtgtcgacatggacagccccgtcaacatgaagttcaacctctcccacctcggctctaaggagcacatcctggaactaaggcccgccatccagcccctcaacaaccacatccgttatgtcatctctcaagggaacgatgacagcgtcttccgcatccaccaaaggaatgggctcagctacttgcacacggccaagaagaagctcatgcccggcacatacacactggaaatcactagcatccctctctacaagaagaaggagcttaagaaactggaagagagcaatgaggatgactacctcctaggggagcttggggaggctctcagaatgaggctgcagattcagctctattaacccttcacagacttgggcccaggctcaaatcctagcacagccagtctgcagaagcatttgaaaagtcaaggactaattttaaagaggaaaaataataataactcttgtttctttcctccctgtcttagactttgaatgttgaccctcacagggagggataatttagactctggtatggccaaagatttgagcacaaaggcaaccgtggttactgtattttttatataacttcattttaaaatatattaaaagaaacctaaatgttcaagatatcagcatatggcactaaatgcacaaaaataatgtgagctttttttttttttcctgttagcagtctgtaacactttgggtattttgctatagttgctaattaaaaaaatatagatgtttatttatttttaatgcagtaatatatggagaaatgaacaaactatgtaaacaaaaagggaaactcacttgtttttctttagatttataaatttgagctattttttttagaggtgctttttaaaaatccaatagatacaagagatgtttcctttggttttctgccagtcatccagctgatacacacctgatgattttaaagaaagccacacagagctgaatgggcagtgtaatcaataatttaaaagacatgaatgtcattagatcctttataacgtagatcgaagccaaagcagctcatttgtgacaacatttcatatcaccagacacaccaggcaacagaagttgaagcacaaccactgtagcaaaataccttgactgcttgtgagaccattagcattgcaggccaaaccgtactgtatttccttctcataacctcaaggaaccatatgtgctacccacaacacctcattcttacccagggtgcgctgcgtcctcatggtactgtaggcagctgaagaaccgccgttcccttgaaagggaacacctggcattctgtggtgtttcgtgctgtcttaaataatggtgcatttattatgttcaagttatttcaggattgccatatgtgcaaacaaatcatgcaatgcagccaaggaatatatgttgttgttgttgttttaaacccattttttttttagaattttcattaatactgtagttatacaccatatgcctcattttatcatagcctattgtgtatgaaagatgtttgtacaatgaattgatgtttagtttgctttagtcatttaaaaagatattgtaccaggatgtgctattaagagcacgtatccattattcttctcaacccaagaacctgtttcctggaccagtgaccaaacctcatatgtgaaatggccaaagcacatgcaggctcctggttgttcctctcaaacctgtgctgaccaaagattagtaaccagttatacccagtattttgaggttttattgtttttttaataactaaaaagaa

SEQ ID NO: 1113 - protein, 2910 aa, Homo sapiens [sequence omitted]

SEQ ID NO: 1114 - DNA, 34988 bp, Mus musculus
  misc_feature (1)...(34988): n = A,T,C or G
ttttcttagcacttacctttgatagcccatgacttctgggagctcatcagaacagcaatgaagaaaaatcttaacaccagggctccaattgtggccattttcttcttgggtgtttggtgggttcagaagcgatcgcagactgaggcagaattaacaagaactaaaagggattaaaatccaaagcactcaacttttaaccaatcagaaaaatgtttcagactgacacatctgttgctaggaaagggttccttgcaaccaggtcctatttagtatccgagtttccacttaacatttcaagaaataattttcctcaagaagaaatttttccacttattaacaaaaaaataataaaggctgtagacaaacaggacaaaaatttcaagagattgggaatgttggttgtaaaatacacaatcttctgtcccaatctaagttctatctgaaacacatcagtgaggctagaataaattaaaaatcgctaatatgaaaaatggggatttgtacctctgagtgtgaaggctgggaagactgctttcaagggacattgaattatctaaagagaaacggaacaagcaggtgatggagaatgcccggattctggtaacagaatgtcattcagggatctccttattgctggatgcatctccttttgcagtgggctagacaccaacatggtcagttcagcccaaggttccagggccactggaaaatattgttttctgatggcattggaaaataaactgagtcccaaagctccaaagaccagagagagttggggcacctctggaagatgggtagcgatcactagaaaccatgggctgtatggggtcctcctatatttgtcatggcctagagaggatctctagccagattgtgacctgaaggtgaatctgggcttggatgtggaggccactactaaagaatagcttgggcacacccttagcctaggtcaatgggcagtggaagctctcctcctgtcttataaggattaaaggcttgaaccaaaagtgtattttgagattctccatagatgttcctgaaaattaggaggttttacatgtcttgtttctggaaacactgtataatactccgaaaaatatttgcttacagacagaaagggctaaaagccaaagagaagccgccaagcagctaggtttcccacctggggctgaattagtgccttggtgaatcttcaacatagtaacacaacaaagacgctgatggaccaggagggccgccatcctcctgactgctgatggtccgatcatgccaggggctaagtaaggcatctgatatcaacccccagatcactaacaggatcatcccggggtcaagaggctgatgcaacaattctgtggtgcatgctggcctcctttttcagagccaaatcaagccaacacaatttttgcacctatcttttgctagcttcttaatgccatgctcttggcaagtgtatggtaagtttaaggtacctctaaatacacagtgctacttagcaacttatgatgctgccgagttcctgtctgctgattggttctgctcctgaaattattaaactagacttcagagaatgactttcagttccccttctctgtgatggggagaagtctctggcacactgttcgtggtttcctgttctcccaaagtatagcttcctgtgtgtctgaggggatttctgaagccacctgaataatgtatccttggtgacattaaaccgtggtgagctactgtcatgggtcctccagaaaacagaattgaatatgttacaagaagtatagcttaaggctggcagagcactggtcagggtcgacttttaatctaaagtggtcagtggcctctgggaagtcccgctgatgtcatagtttcatcaaagcccacaggacacaagggaacatcatctgctgaggacgtcaccaatgcctgcttgccaatgttcaagcctgtgacagcttgctcaccacatgacacaggtccattttctctctgccacccaaaccacacagcttgtatccacactcaaaactgtgtgttcagggtgggagaactgagcctcagaggcaaatgggagtattctaaagattactgaattatacgaacatgactatcatctatatccatattctttaccggtcatctgacttcattctcccacagctccgtgaccatgagtgcatccacactggacccagatcagttctggggcttcagtgcattttacgtttgtttgatccaagttcttccattttagcttcccttctccctctcccccgaatgctgagctgctcagtatcatatccccatctgttcttttgctctagattgccatgactgtggaggtctttcatttttctgtgtaaattttaggattgatttctatagctctgtgaagaatgccattgttattctaacagagacgacactgagccactaaattccctataatagaacaacattttgacaatattagttcttccaaacaatgaatgtggaaagtgttttcctttctgtctcttcttcagtttctttttcttttcatttaattaatttatttgaatattaggaattaaatttagggcctcatctcacaccagggaaatgccccactattgaatgataagcccaatataaaactgtataatcctgagacagggatctcatctaggctggcttaggactttctccgaagcccttgtcaactttgaacttgtgatttccatctggctgaggcacaattacagggcaccagcaaacctggtttcctcttctttttaatcggtacatttgtgtgtgtgtgtgtgtttgtgtgtgtgtgtgtatttaagtttgcagagaattgtggctattgagctcctttcacaatttcctccttaggaaatctgttgatggtgtgtgggaaagctattggtttcagctgttggttggttttgtgtcctacctcgttacgaattacttggttaattcagtaactcctccactgaagccgttagacagctggaatattcacacctgagttatctatctactggtaacatttcagctaactctgagagaagagctgaccactttttgaggtgtgctttaatagagccgggaaaggaaacatgacagcagctttaaggttaacaaagagcctctccctgtcgctctatgttcccaaccacaaacaaagctttggccttaggattcctctggggtccttaggagagttgacataattggtgacagcagctaatttttttcttcttcccccatacccaggcgctgaattgagtatgctattaaaaaaaagttaatttgattgaatgatggattgagcaatattaggctttggagagcagctcttcagaccttatccaaattgtgcctccttgaaacactagcatcttgtcttgacaattccgccatctactggtcattggtggaacttcaccattggcttgcatttcgcagagatggagccacaaggggaagggacccaataggtgggacccaataggtgggtttcaaggatacaaaggctgggactagtagtacccagtaagctttatttattttttttctcaacactaggatgctcctcttattcccagagtgacatgaacctaaacatctgaaatgttgaaggtcgcacctccctgctttcttcctctgggagagcatcttcttcacacagggctgcagcaatcagctttgaaaaaggggattggctgattcccgttagacgatattcaacctgaagctcctggtttaggctggaagtttcagcgtcagtggaagaggacaaatagcctgactgaccctgactggacaagtcaaacgcccagggctcctgaaggctcttatctcacaggatggtgtgtctgaaaattacaagcagctgggcatgagttcatatttgtaggaacagaaattaagcattggtttggagtctagttctctgtgatcctagagagtttaaagaattggcgcaaaccctgtgttccccttgattccccatatgtagctccttgtttgtatctgcggcaaaatcaactttatcactttcagaaaacaataactggtgagtgattcagacttgtaagttctcttaaagtcaacttgaaagtaaattaagattttaagtgaaaaattaaacattcagaggatctggtttgtcagaacctttttggattttaggaccatggtggaacagaccgtagtccctgagcaagaccgtagtccccgaacagagcaccatgaaaaccctcaaagtggcagcaggcctctccttccctgccccagtctaggaccaccgcggtaaaatgatgcacaggagccatgggctcctgttaaattggtggctccacaacatctcagcctgcagccctcacgggagctgtccatggcggtgcatctcctttcctgcctcagtgggggctgatcctcaggagctgtccacagtggcggcacctttcctgcctcagcctacagcctcggtgaaacacggaaggagctgatccgcaggatctgtccacagtggtagctcccttccagtcccataccctccccaacagacccacaaagatggcgcctcagcaaacgccagctgcagccgggaagaatttttcaccttaacccatgaatctgatgcaggggaaagggagtggggtgaaaaaaaaccccactaatccctgacattctccccccccccaagctcaggacttgaaatcccaccaatcttctctctggagatttctgtcctgaaaagcaccgccccctcagaaaccctatataagcactgcccttttgctcagttctctgaccagttcactcccagagcagcgggcagtcatccctggattcatccctccataccctggatcctccaataaatctcattcatgagattgtttacctggtgtgactcccatcggaaaaagccaagaagaaaagaagcaatgaagagaaaaagcgaagagaatttgatggcctgaggctcctgagctcctcagctcagctggggagaccctcccctgggagctgcaatgcctctgctgaggagacttcctctcagagctgtgtggttcctgtggtctcctgtctcaggatgcccttccactgggacaccttcttccctcagagctgtgtggaccctgggctcctgaagtccaggataccccccatccccatccaagcagaagcacttacactgaccatgcaaagagttctgtgggtgacagactgatgccagggctaagaactgcccagtctgaaacttaaacatctggaagtgttgagtatcactgacctcacattcacacacacactgctgcttcctctccaccttttcctattttcccttcctctctctctctcctccctctctatatcccttctcttcccttcctcttcccctctccctgccccaactactgatttctttagacttttagctctccttaactttaagggacttcaagtggtaaatctctgctgaaaggtctttctatgaaagccagattggccaagaattcctgggctgtcacaggtgctctgctcctgtgatgtcatgacttctctgttcatgtgatgtcatggatgctctgcttcttgtgagtgcctgttcatctcaccctaccttttcacttcttgtgcagctcatgacccatgaatgaggactctcaaattcagaacttagtgttcccacctctgctaacctgactaaggtattcccccacagatcaaccccacctatgcaatccttcctggggaattgaagtggaaacttaaggattatttggaaagtgttggatggtgttttgctagagcaaacatgtgaaggaacatttcgctgaattgacataagtgaaaggatgttctgttaaagcaagcatgtgaaaggatacgtgatgaaggagtcttcgctaatgacatattggtctgccttacattgcgtagttgagctgcatttgtcaggacttcatagagagaaatgcaccaaaaaacttctggtgacgtgctgtagtttcttgtcacttcttcggacttggactgattggcagagtgatgccagctgagacagatgcatgtgctgaggtcaagacccatggaagaaacgtggtttggagggtataaatagaacttggcagacagtggtggaggcagagcttggcttgcttatagagttagctatgtaatgcttttggggtctctcatcttcactttgctgagagagatgaagccaaggacttttcctggcatccctctgggtccctcctgctgacttgtgctgaagttgaggcccgctgtctctgctaggcagtgcaactggtgctgattcatgtttgctatccagactctaccaaactgactactggtgtatccaagaagtgtttgtaagtggatcgagctgccactgctaacctgtgcctgacaacacagatgggatttgctccaaagaaccatttctaaacaggtccacttcccccatattctttattttccactgccccctggtgggtaatgggctagaagggaggggttaaagcatttaagaaccatcattaaaaatagactttgaaaaaaattagttacagggagtcccttctcaggagactctacactgagtcaaggtgacaactaaaactaaccattacaaagcccggagatggtggtccacacctttaatcccagcactcagaaggcagtagcaagtggatctctgagttcaagaccagcctggtctacagagtgagttccatgacagccagggatacacagtgaaaccctgtctcaaacaaaacaaaaaacaaaacaacaaaaaaaaacaaaataaaataagcaaaaaaaaaaaaagaaaaagaaagaaagaaaagaaagaaagaaaagaaagaaagaaagaaagaaagaaagaaaagaaagaaaagaaaaggaaaagaaaataaccatcacagacagggaacaatccttctattctgagggagaaatagcccttgtatccttcttaatatctagtcctcccatcccgcacttgggaccttgtctagactcactgccttcgtcaagaccagtagcttcaagctagatggagcaggattccctaatcctgagagggaagaatcagggaaaagcaccttgcatgctgtgctgttacactgttaccttgcatgctgtgctgttacactgttaccttgcatgctgtgctgttacactgttaccttgcatgctgtgctgtttgttacactgttaccttgcatgctgtgctgtttgttacactgttaccttgcatgctttgctgtttgttacactgttaccttgcatgctttgctgtttgttacacgttaccttgcatgctgtgctgttacactgttgccttgcatgctgtgctgttacactgttgccttgcatgctgtgctgttacactgttaccttgcatgctgtgctgttacactgttaccttgcatgctgtgctgttacactgttgccttgcatgctgtgctgttacactgttgccttgcatgctgtgctgttacactgttaccttgcatgctgtgctgttacactgttaccttgcatgctgtgctgttacaccgttaccttgcatgctgtgctgttacattgttgccttgcatgctgtgctgttacactgttgccttgcatgctgtgctgttacactgttgccttgcatgctgtgctgttacaccgttaccttgcatgctgtgctgttacaccgttaccttgcatgctgtgctgttacactgttaccttgcatgctgtgctgttacactgttgccttgcatgctgtgctgttacactgttaccttgcatgctgtgctgttacaccgttaccttgcatgctgtgctgttacattgttgccttgcatgctgtgctgttacactgttgccttgcatgctgtgctgttacactgttgccttgcatgctgtgctgttacgctcttacaatgaagaacaaacattcttctaaataagtttaaaactgctcttcccagctcttgaaagtggatctggagacccctcaatagtgtgaaagagaatttaggggatccccaagaaggactgaagaaagaagagcacataacaggggtgtccaaggccctccattactagccatgctcattgtacccacacgctatatcagaaagcttattacatttcttgggtgaagcctttgttttccagtaaaagagaaagaacaaagaaaaaacacacaggcaccttggcctgatgttctggtcttggacagggaacatcccctcctagacttggttttctactcagtagggtgaaggttgagtatctgatagacagtcatgctctgcactctgagggtccacagactccgtgttgtgagagagcttggccctagatggggaatcatagaagttcagcaagctgaaggacaggacaaagtagccatgatttaggccactgccagatgtcaggtcacctacctgctggacagggcatggagcagggtccagcctgcgtgctggtgttctgaagagataagggtcaacattatcactgtgcctagaaggctagatgaatcagaacagagcccaaagtccacctgccttccttctgagtttcacttttgagcagaaggtaaatgtgctgctctgactggagcctcattttagactgaccctcggggactcaactctgcctacagattgacaccattcaaatcttccttcacgcaaactggtgacgcttccactttccttgcctgctccatcaccagtcactatgctctcctgtccttagacacctgctatgtgaatgaaggacacacttgtgactgggtgagaccaacagcctccatttcaccctaaaggaaagagcaacaggtgagtggcttggagagtctctcatgaaggatggacatgggagtgggggtggggtggggaggagtcaactaagatgaggaagtaggtagagccagcatcctgtcaggaaatggttcttacttcctgttgatctccactgcacattttttagagagtagtgttttgagacagactcccactctatagccaatgccggcttccaacaaatggcaatcctcctgcctcagccttctgggtgctgagattatagtgagctaccacaacaagctgagtttttcctctttttaacatcattgtctctttagctcaggactgatttttctttccaatcaaaaaacttccttcagctcaggttggtctcaaaccagacattgtcttgcctcatcctcttcagtatctgcctcctggtgtatggaatttcaatctcaggattcacgagaggtagaggaaggacttcaaggtcatccttggctgtgttgcaagttagaagccaactggactaagtgagacctgagggggagcctaagggataacgtacagtgtaactccatcgtgagagctcaaatgtgagtgagtgagtcagctgtgatcaacaactgaaaagaacggggccaggccatgatctgatgatgacaggtttggtgctagttgtctattaagatagcatagccatcagaagtcctagtttgcttgctattgctgtgataaatatcaagaccaaaagcaacctaggaaagaaagggttaatttcatcttacagctggcagaccactatgaagggaaatcaaggcaggaacccaagcagtaacctggaggcagacactgaggcagagaccatggagcaacactgcttgccctctgtgacttgctcagcttgtttttttacatcatgcaagcccacctgcccaggggtggcactgcccgcagtgggctgggtcctttcccatcaatcgttaattaagaaaaattcccccacagatttgctcataggccaatctgatggaggcagttcctcagttaggatcccttttctcagatgactctagcttctgtcgagttaacaaaacaaaacaaacaaaaaccaatgcagaaactgcaaggcatggtgggtaatcacagctgtactttcttctatgtttgctccagggaggatggtggattgcccacggtatagtctatctggcgtggctgcctccttcctcttcgtcctgctgactataaagcacccaggtagggtcccttcctacccaccccatccccacttgctgtcatgcccctcagttctaaaatgcacagtctcaaacccaacctgacagtgcagtacaaaggggtgcgggctcacactggcctttccacccctcccccacctccccatcccctggctttggaaagcttcttgacttagttgctcatctcttgggtgcgagtgacaactttaggcggcactggaagtcacctggaaagcgcaactggaatccatagctggagcatgctcagttttcacacaatactcaactctgcggggaagaccacacacgtaaatcccaccagccaaagacacaagatctctaagtatcggagagaattttgagcagtatcttaaatctgagttaagagtacccttatgactacttttattttattagcttttaatgttgcgtgtgtgtgtgtgtgtgagtgtgtgtgtgtgtgtgtgtgtgtgtaggacagtgtatggggggggggtgcaccctgcagcttgcatatgagggtcagaagacaatttgccttagctggttcttctccccaccatgtaaatcctgggacttgaaccctggtcttcaggcttgattgcaagtgcttttccctgctaagcttccactcgctcctcctccctacacagggttttgggtctacccaggctggcctctaactcacctggtagccaagatgaccttgacctcctgatctttcctgcctccacctccccagggccgggactacagaagaagaatgggtacccacgacatgaaattctcaaacatcacagcacacagaattgtcaaacacatctttgatttttcagatatcaaagaacatgacttaagatttgatcagaagactcaaactttctaggcaagccttgcctctaacccaccatgagacacttttgtgaaacctacatttgctatttactggactcttgccttctctgggaggaaaggaaaaaaccaatcagcaccgtccctgggatgagtgacccaggaaggtagaaggacccagtggcttcgctatttacctaaactcaaaatgactccaaaatcaagataaagtccccatggaaacatcaactcacatattaatttatctgggaatgaaccccagagatgtggttgcttttggtatcttaaagatggatggtttaagcctgcaaaactcagggctggagaggtggctcagttaagagtacagaaaactcttccagagagccaagttcagttcccagcatctactgccgatggctcacaaccacttgtaagccagctccagggaacatgatcttcttttctggtctgcacacacatgtgtgtacccacacaaatgtgcatagttaaaaataaaacactttaaagaaaaaaacaaatccagatccccaaagctcattaactgtggaattgcctcccaagtggtgacatatattcacgctcaaaattttaaattttagaacacataccgtttatttttaaccagaaaatgtgcaccccttccatgttttaattctctgaaacattgacattaaatactttcctgctttctgttaacaagttccagcaccttggctacttgaagcgagcatcctggttctctggcttgcctctctgtttcctctttcactgttttgtagatgacttcagagtggtcggtcctaacctcccaatcctggctaaagtcggggaagatgccctgctaacgtgtcagctcctccccaagaggaccacggcacacatggaggtgaggtggtaccgctccgaccctgacatgccagtgattatgtaccgggatggagctgaggtgactgggctaccgatggaggggtacggaggccgggcagagtggatggaggacagcactgaagagggcagtgtggctctgaagattcgccaggtccagccaagtgacgatggccagtactggtgccgcttccaggagggggactactggagagagacaagcgtgctactccaagtggctggtgaatatctgcccaggggcccaggggcacagaggaacaggggcacaggggcacaaggggcacaggggcacaggggcacaggggcacaaggggggatggatccacttacctttgggaactgtatcacctcttgaaaaatcctttttcaaccaccgaaggaggacatttctttttttttttttcttactcatttttaaaataagaattgtttgcttttatgtgtgtatggggatattctgcctgactgtgtgtctgtgcgccatgtatgtgctcagcgtccatggaggccagaagagggtcagatcccctggaactggagttacagatagttgtgaactatcacgtgggtgctgggaacaaaacccaggtcctccagaagagcgaacagtactcttaaccactgagccacctccccagtcctcctcctcctcctcctccaccaccacctcctcctcctcctctttcttttttcttcgagacagggtttctctgtatagccctggatgtcctggaactcactttgtacaccaggctggccttgaacacagaaatctgcctgcctctgcctcccgagtgctgggattaaaggcgtgagccaccacgcccggcttattaagtccttgagaatttcatacaatgtattttaatcatatccttcctctccccccaacccctcccaaactccacccccttctctacccttacaatcatggctcccccaccccaccccatctcttccttctatccagtgctaattgtaccatccacacattcaagtgtgtgaccatctgctgagcttgctcaacctaccatgggctacacaccttaaggaaaattgactccttgctcccagcccatccccagctcctggcatctatcagtcatcaatatcttctcagctgggcatgggattcatgcccatctccccatctatgctgagaatttgtcagcttgaggtcttgtgcacgctatcacaaccactctacatgcaggaggggaggtcaggcaaacccagttgcttcaccagggaatgattctctggggacactggccactctggccaatgcagtttttaccaccaccttttgaaaaatccattagcatgcattccttgtgcaaagtgatggatcttgtgatgcttttgttaagtttatcatggtcctttaccatatttacccatgccttctcctgtcacctcccatcatccccttctgcttaataccatggtctccagctccatccattttctgtgaataacttcttttaattctttttgagtgaataaagtgggttctagaaagatggctcagcaattaagaccccatgtactcttccggaggagccagttttgattcccggcacccacacagtagctcacactatttgtaactccaattccaggggattcaatgtcatctttggactccacaggcacaagacacacatgatgcagatgcacacgcaaaacacccacacacataaaataaaatttagcacaccatggtcacttggctatccagtcatctgtgaatgcatatcggggctgaccctacaacatgggcactgggaagggttctttcttcatgaatgaatgtgagcttaaattcccttgggtgtttttccagaagtggagcaatgggtgttatatatcagctctgattttagggggctttttgtttgtttgtttggttggttggttgggttttgtttgattttttagggggggggttcctttttgagaaacatccacacagatgttttaattgttcccattagtacgttcaattggctcaaaagaatggacgtgagaatctgtgtattgctaagctgcaggtagagctggacactgattcatgacactcagagacattgaaatttaagtcaaatgttatctgtgggtgcaagtgaaaggcttattcatctgttttctcagccagtgatataaacagctgtgatgttttaaaaaaggcactctatggtttacacaaattagtctaaaatagatttccccacttcaagaaaggtacagtaatttctcaaccattttactgcataccaaaattgcaactgcccacgaatctaacaaaccacggaagaaatgaaaatagcccataaatgtgatgtctgagttaataataaatgtctcatttaaactagagttctgatatcatccaaaaacagcagacaaggagcctactacagagaacatgagaagcaaagttgagggcagagatgtcatcatgattaaattaggacatagacattcctcctgaataaattagggcacagacaacctcatgaataaatcacaccacatcttcaaagtaccagagtcacaaagcaaactgtgtcatgtttccctcctctccctttcatctactgagtctgaagatgctaatgtttaaagatacaaataaaacagccagaactccatttgactgggaaggaactctggtaacattgtctgcttcccaggctgtgggctcccacctcctccctatgaaggactaccccaggtctcggttcgatctgtggactctgggattcaaagatgtgcgctttctctctctctctctctctctctctctctctctctctctctctctctctctctctctctctccagctctaggatcttccccaaatatccatgtggagggacttggagaaggagaggtccaacttgtatgcacgtcccgaggctggttccctgagcctgaggtgcactgggaaggcatctggggagaaaagttgatgagtttctctgagaatcatgtgccaggtgaagatgggctattctatgtggaagacacactgatggtcaggaatgacagtgtagagaccatttcctgcttcatctacagccatggcctcagagagacccaggaggccaccatcgctctgtcaggtcagtgctttggctcaggcaccacagatctcaggggttccaggggctgctcagcagcaactcttctttttctttaatcatatttatgtaatatgttcaaatttataaacattcatggtatttcagtaatcttcaagtttatattttactccactgtgttaattttgctacacagatgttaaacacattggagatataataaaaatagtcctttaactgagacgtcttcttgtggtgtgccagttgcttccaagaaccaatcatgtgcttagtcagaatgggatggtttctttgacagcttcttagttatagtcttgtcaataagtagtaacaaaaacaataatcaaaacacacaatacaatagttacaggtatgtttcctatgttgttagaagttagagcagagagggagagttgcacttaatgattcttagagcccagaaagtcctcatgctcagtgataaagctccacttaccatctagtatctatcacctatctcctacatatctaatctatcaatcatctgtctgctgtttatccatctatcaaccatttatcaattacacatcactacagttacaattaactatccatcgtcatgtgtctaatccaccatctagctgtcacatatctatctaccaatcaacatcatctatctaatcatctaccattgatcaatcatctatctataatatatcatcatatatcaatcacctgtctttctaaatatctatcatctacctatctgtcatctatccatccattcatccaattatctgtgtatccatccaattatctatcatctgtctatctctttgtcttatctatctgaaatagacatttgtatttcttttgagaccgtctcagtctatactccaagctggtctcaaactcactgcaatcctcctggctgagcctcctatgggttgttactatgttactataggcatgaaccaaccagctagactttgctgcttatgtgaggagaattgcctttaaacattttaaattgaactgagaattttaggacactctgtgtttggatgtattgctggtgtaagcaaaggatgcattaaagagttaaaagtaaatgttgtgttaatgttaattcaatatcatacagcccctgtttagaatactaagtaatacttgtttatgactttatatttcatacttagcacttatttataaaaaataatacatatgttttactagtgcttaatatcagcagaaacaaaatggattgacggtgatagaaccaacctttttgttgagaaaaagtaagatctatgtcatcaggtggtccatgggaagaattttctgtttttcatactttttaaataaattgagttcttgaataaaaagtgaagctcacctttatttctggaaagtttctttactttcctttagaccaaatcccttaagatatttttcttttttttttctccagagaggctccagaccgaactgggtgagtgggacctgcgtgcacgcccatgcatgagggcagagcattgagagcaccggggacacctcacgatcctcgtgagaatgggaggaaatgccaaggcacatcctcaaaaacttcctttggggattggccaggggaggctttttcaatttctgttgctacacacccacctggcactcaggtttagcccatgatcacagggtagcacaaaccgattgtgtaaagtctgcccatttagtgatggcctctttatcttattctgagaattttagcagtaaaatcattcccttattggcgtgtagcctggcctttaattaatgtttccttcagactagcaaggctcttctttaaattgcatgcagactacaagccccaccttcctccaaggagggaccctgggcctctaacctcccctgggatgctcgtgggttccaaacctcacaggatgtccatgttagtagagtgattttctctgtgttgattcatctatgtctggtgtatttaacagcttccgttagcgtaatcggacattcccagcccagccctgttcaagtcggagagaacatagaattaacttgtcacctctcacctcaaacggatgctcagaacttagaggtgaggtggctccgatcccgctattaccctgcagtccacgtgtatgcaaatggcacccacgtggctggagagcagatggtagaatacaaagggaggacttcattggtgactgatgccatccacgagggaaaactgaccctgcaaattcacaatgccagaacttcggatgaagggcagtaccggtgcctttttggaaaagatggtgtctaccaggaggcccgtgtggatgtgcaggtgatgggtaaggataccaggtggatcttttggcttctccagcttcctaacactgtggcacgctggttcctgggagatttctctgacacccaaaatattctccgtgctcattcattttcaagtttatattgaacttttggtgtagcaaccaccataaacacttcaagagcacaaccttgggtacacagatttgaggtttttaaataaatacttctttactaattccctgagaatttcaaaccatctgctttgataatattcaccacccaacttcccatcctctttttacaaaattaataacccatggactcctatttccgctgtccacatacttgtgagtgcagagccatctactggagcaaggtcaacctgccaggagccacatccttaaagagaactgactctcatgtcccctgaatcatcaactgtccatagctccttaggtaggagagggctcagagccccttccaagctggaacattgaccagcttgatctagtgcaggtcttgcatagacaaccacagctgctgtggtgcagtggccctgtcctattcagacactttcagtacggttcccatcccccaaactctgactcttacaatagtaccacttccttcttccatggcggtcacttagccatggggggacaatgatatagacatctcatttgtgactgaatcccccattcaatctctgcactttgaccagatgtgagtttctgtcttagccactacccactgcaagagaaacttctctgatgaggtctgagagctgtgctaatctatgggtacaaagagaaaagaatttgatactatgtccatttagcaaaatagtagtagtaaggtctcccttcaccactgtgagttcttggccagactgacagcactaggcaggcctttcctgtggtttaaatgtttaagtgcagaacaatcaggaaggtgggactctcaagcactccgtaaagtgacattctgagaatattccccatgattttacacaaaccttgttatttcacagtgctgctaagattctgggaaataattggtttccaggaattgtagtaatttgaagactcagctagatctaccacatgcacagaatctgtaaagactgacagtcttggtgtgcttgnnnnnnnnnnnnnnnnnnnnnnnnnnnnnnnnnnnnnnnnnnnnnnnnnnnnnnnnnnnnnnnnnnnnnnnnnnnnnnnnnnnnnnnnnnnnnnnnnnnnnnnnnnnnnnnnnnnnnnnnnnnnnnnnnnnnnnnnnnnnnnnnnnnnnnnnnnnnnnnnnnnnnnnnnnnnnnnnnnnnnnnnnnnnnnnnnnnnnnnnnnnnnnnnnnnnnnnnnnnnnnnnnnnnnnnnnnnnnnnnnnnnnnnnnnnnnnnnnnnnnnnnnnnnnnnnnnnnnnnnnnnnnnnnnnnnnnnnnnnnnnnnnnnnnnnnnnnnnnnnnnnnnnnnnnnnnnnnnnnnnnnnnnnnnnnnnnnnnnnnnnnnnnnnnnnnnnnnnnnnnnnnnnnnnnnnnnnnnnnnnnnnnnnnnnnnnnnnnnnnnnnnnnnnnnnnnnnnnnnnnnnnnnnnnnnnnnnnnnnnnnnnnnnnnnnnnnnnnnnnnnnnnnnnnnnnnnnnnnnnnnnnnnnnnnnnnnnnnnnnnnnnnnnnnnnnnnnnnnnnnnnnnnnnnnnnnnnnnnnnnnnnnnnnnnnnnnnnnnnnnnnnnnnnnnnnnnnnnnnncacactcaacctattgctgctgtcccttctgctccctcttccctcctcctcctccttctgccatttctcctcttcctcctcttcttcttcctcctccatttcctcctcctttatcttcttactcttttcttcttttcctcttcctattttattttcttctccatggtggagtatttttaaaataaatcttttaaaaataaatatttgtctcttgcaaagtttgtcttcaggtaacctaaggacaacatttctctgaatttcttctctctctgtctctgtctctctgtttctgtctctctgtctctgtctctgtctctgcctgtgtgtgtgtgtgtgtgtgtgtgtgtattttactctatctacaaactcccccttgttgtcaaaacaattctggcatgtctttttccctctgatgtaaattttattctgcactagaaattaattttcctcaaagccctggcagttatgtttggcagactttatgtttaccaccgtagttactccagtaatctgtggtggagtgatataatgggaaggagagaaggaaatggggtggggcaccagcagacataagcttacctgcttcccttggcacctgactttcaggaagactgagccaacgggttcctggagagacccagccctcaggctgctcctgtgagaaaagccatctcgatgttttgctcatctcatgacctcctggggtttgcatttcagactccaagatagctttgctatggatgaccctgcctgttgtggtgctgcctctggccatggctatcgacctgatcaaggtgaaacggtggcggcggaccaatggtgagtgggtgaacagggcggacaggcccgaagtcattcttcagcagctgatgaggcctggcttactcatgtattcaaagctcagcgctgagtgagcttcgagtttacagcaatggggttaaaagacagtaacatgaggactagagagactgctcagtgtttgaaatgtgaggacctagatttgcatcactctggtcatttccctcagcctcgtctagcctggtggggaagtacaagatgtcatgacacctcagcataggaggatcagagaagccagaaagcagtcaggggagggctggggagatggctcaggagttgagtacttgctgctcttgtggaggatctgggttcagtttctagcgcttagctgggggctcacaaccatctgtaactccagtatcagggggttgacatttccttatggtcttagcaaacagaaaacataccagggttcacagacattcatctatgcaggcaaaacattcctacacataaaataataaaaagtaaatagatttaaaaaaaaaagttggaagaggagacaaagaaggacagggagaaagaataacaaatgatgagaaagttcggtgacaactgtgtaagaaaatgccacggtggaatctgccccaagtgtgctaactacttggagctggtgaggtggcttaggggttgagagcaccggttgcacttgcagaggacccaggttcgattcccagcacccacattgcaactcacaattgtctgtgactccagtcacaggagagttgtgcagcctcaggcttcctatatctaccttgccaatacccagccatgaccttatgctctcaatcattatcccaccacactgccaagcaggaacactcttgatcttctaatgtttcagtcacgtaaactaaaccctatctagtccccaacctccggggttccatctctctatcagtctacaaattacttagtcacgtgcttccttggaaactcagggcgccacatcttccagttaccacagagctgccccctgaagctctcgttggtccctcagcccccaagtgccattctgtgttcctacatggcccaggccttaggccatgccctatcacccaaggctgtggacacaggtgactaatcctgtgtccactgctggtgtcttatgtagctgtcatggatgaacgacccctctcaccaaaacatgaacaggagactgaggcagagcattgatgacagtaaacccaaccgtggtgttagatggggtgggggcgggggtgaggggcttgctgatacaatgttttcctttgccctgaaaagaaagacaagcctgtcagacagcaagacatggcataggtagggacaccctttctgccacaagggcagaaagataaccccaccccccaagttctttcttgactgtttctataatagtaaaacctaatttcctaatttaaaaagcacttttcaggccaaaagtctagtgtttatattgtttattatgcaaagatgtagcttgcctcttctcttactgtcttagtcagggtttctattcctgcacaaacatcatgaccaagaagcaagttggggaggaaagggtttattcagcttacaattccatactgctgtttatcaccaaggaagtcaggactggaactcaaacaggtcaggaagcaggagctgatacagaggccatggagggatgttctttactggcttgcttcccctggcttgacagaacccaagactaccagcccagagatggtcccacccacaaggggcccttcccccttgatcactaattgagaaaatgccttacagttggatctcatggaggcacttcctcaactgaagctcctttctctgtgatagctccagctgtgtcaagttgacacaaaaccagccagtacacttacctagacccaccaacttacgttcactgaaaatcgtgtggtcattttttcacacccggtaacttttctctaggctgcaccctactgtgtatttttttctaggggtcatgggcctcagggcttgctggttttccatctcagtcctacacccagccggaagcccatgaacaccactccatctgacttcagttatctgcgaccctttcctctctcctcatccttgacactctgtaaccccctcttcttctgtttttccttccagaacaaacacacagcagcaatcaggaaaataacaagaatgacgaaaaccacaggcggcgacttccttctgatgagaggctcagatgaaaatgcaccccgcaagcccaacgcaccccatttcctgaacaccccatccctcctcccatcttttcccctcaataagctgcactgacataggagtgctttcacttgctgctctccaaaggttcttcatggaccctgtccgtacctgatgcaaccatcacgcacagttgggagcacctcgacctgagccaacccataatagtcttgatccctctctcacagtgatggcatcttctctccctttgtctctttctgctatccctcaatctagggactatcccttgcctgtgcacagcatctttatctcatcaccttctggacccaccgtgaggatggaagaacttagacctgcagagaaatgtcactcatctgagtcctggatgggnnnnnnnnnnnnnnnnnnnntctagtgcagaataaaatttacatcagagggaaaaagacatgccagaattgttttgacaacaagggggagtttgtagatagagtaaaatacacacacacacacacacacacacacaggcagagacagagacagagacagagagacagaaacagagagacagagacagagagagaagaaattcagagaaatgttgtccttaggttacctgaagacaaactttgcaagagacaaatatttatttttaaaagatttattttaaaaatactccaccatggagaagaaaataaaataggaagaggaaaagaagaaaagagtaagaagataaaggaggaggaaatggaggaggaagaagaagaggaggaagaggagaaatggcagaaggaggaggaggagggaagagggagcagaagggacagcagcaataggttgagtgtggggtgcacacctgtaatcccagagcttgtgacgcagaggcaggaggatccgaagtcccaggctagcctgaatacatgaaacctctcaaagaaaaacacaacaaaacaacaacaacaacaacaaaaccaacaaaaacaaaaaaacatagagcccaagccatttgatacttggttcccaagccagaggaaggtatgcagtcaccaacctgagagagggaaacgggctgttttctcctggcccagagggaggctgatggagcaggtcacattcaccatggagccgtttgtgaccagcagaagtgtctccacctggaacagctcctggctcccttgctgaaaggcctcggaaaacgatggcattgtctttccatctctgtccctccactgcacatggggccgtgggaaccacccatcagacgtacacctcagctgcatgcctccatctttcaagacctccctggtgatccgtggggtggaacccaccgctggggacagagaccaaggaagccgatggagcctccacacatgtgtgtggtcagcaacatcccccgggggtgggggtggggtgagggcagcttggggaggacagagctctgggccaatggcctcccacgggagctgggactggctacaagatttcttgttttgtttttctatctttgttgnnnnnnnnnnnnnnnnnnnntgcccatcccccaaactctgactcttacaatagtaccacttccttcttccatggcggtcacttagccatggggggacaatgatatagacatctcatttgtgactgaatcccccattcaatctctgcactttgaccagatgtgagtttctgtcttagccactacccactgcaagagaaacttctctgatgagttctgagagctgtgctaatctatgggtacaaagagaaaagaatttgatactatgtccatttagcaaaatagtagtagtaaggtctcccttcaccactgtgagttcttggccagactggcagcactaggcaggcctttcctgtggtttaaatgtttaagtgcagaacaatcaggaaggtgggactctcaagcactccgtaaagtgacattctgagaatattccccatgattttacacaaaccttgttatttcacagtgctgctaagattctgggaaataattggtttccaggaattgtagtaatttgaagactcagctagatctaccacatgcacagaatctgtaaagactgacagtcttggtgtgcttgaagaggggcagacaaacatcacccttagaaacagctctccgacatcagcaaatgtttttaaggacataggcctaagtcttggatagccttcatatttcccttataccaagtcccagtctaaattaacagacaggagcatgacacgcctagaggaccatctgttacagggctttcttcctctattttgagaagcctctcttactcagcatcttccatgtcgtccaagtctcatgtttaatcaaaattacttcgttgtcaaggtcaggagggaaaagggaattgaggttacaaaaaagttagatttgaaaatgtattttttaacttgtagtctatcctagaagactgcaacaaagatagaaaaacaaaacaagaaatcttgtagccagtcccagctcccgtgggaggccattggcccagagctctgtcctccccaagctgccctcaccccacccccacccccgggggaagttgctgaccacacacatgtgtggaggctccatcagcttccttggtctctgtccccagcggtgggttccaccccacggatcaccagggaggtcttgaaagatggaggcatgcagctgaggtgtacgtctgatgggtggttcccacggccccatgtgcagtggagggacagagatggaaagacaatgccatcgttttccgaggcctttcagcaagggagccaggagctgttccaggtggagacacttctgctggtcacaaacggctccatggtgaatgtgacctgctccatcagcctccctctgggccaggagaaaacagcccgtttccctctctcaggttggtgactgcataccttcctctggcttgggaaccaaatatcaaatggcttgggctctatgttttttgttttgttttgtttttctttgagaggtttcatgtattcaggctagcctaggacttcagattctcctgcctctgcgtcacaagctctgggattacaggtgtgcaccccacactcagcctattgctgctgtcccttctgctccctcttcccctcctcctcctccttctgccatttctcctcttcttcctcttcttattcctcctccatttcctcctcctttctcttcttactcttttcttcttttcctcttcctattttattttcttctccatggtggagtatttttaaaataaatcttttaaaaataaatatttgtctcttgcaaagtttgtcttcaggtaacctaaggacaacatttctctgaatttcttctctctctctctctctctctctctctctctctctctctctctctctgtctctgtctctgtctctctctgtctctctctgtgtgtgtgtgtgtgtgttctattttactctatctacaaactcccccttgttgccaaaataattctgatatgtctctttccctctgatgtgaattttattctgcactagaaattaattttcctcaaagccctggcagttatgtctggcagactttatgttttaccacagtagttactccaacgatctgtggtggagtgatgtaatgggaaggagggaaggaaatggggtggggcaccagcagacctaagcttgcctgcttcccttggcacctgactttcaggaagactgagccaacgggttcctggagagacccagccctcaggctgctcctgtgagaaaagccatctcgatgttctcctcatctcatgacctactggggtttgcatttcagactccaagatagctttgttatggatgaccctgcctgttgtggtgctgcctctcgccatggctatcgacctgatcaaggtgaaacggcggcgacggaccaatggtgagtgggtgaacagggcggacaggcccgaagtcattcttcagcagctgatgaggcctggcttactcctgttatcaaagctcagcgctgagtgagcttcgagtttacagcaatggggttaaaagacagtaatgtggggactagagagactgctcagtgtttgaaatgtgaggacctagatttgcatcactctggtctccctcggcctcgtctagcctggtggggaagtacaagatgtcatgacacctctgcataggaggatcagaggagccagaaagcagtcaggggagggctggggagatggctcaggagttgagtacttgctgctcttgtggaggatctgagttcagtttctagtgcatacctgggggctcacaaccatctgtaactccagtatcagggggttgacatttccttacggtcttagcaaacagcaaatataccctggttcacagacattcatctatgcaggcaaaacattcctacacataaaataataaaaagtaaatagatttaaaataaagttggaagaggagacaaagaaggacagggagaaagaataacaaatgacaagaaagttcggtaacaactgtgtaagagaatgccacagtggaatcttccccaagtgtgctaactacttggagctggcaatgtggctcaggggttgagagcaccagttgcacttgcagaggacccaggttcgattcccagcacccacattgcaactcacaattgtctgtgactccagtcacaggagagttgtgcagcctcaggcttcctgtatctaccttgccaatacccagccatgaccttatgctctcaatcattatcccaccacactgccaagcaggaacactctgatcttctaatgtttcagtcacgtaaactaaaccctatctagtccccaacctccggggttccatctctctatcagtctacaaattacttagtcacgtgcttccttggaaactcagggcgccacatcttccagttaccacagagctgccccctgaagctctcgttggtccctcagcccccaagtgccattctgtgttcctacatggcccaggctttaggccatgccctatcacccaaggctgtggacacaggtgactaatccctgtgtccactgctggtgtgcttatgtagctgtcatggatgaacgacccctctcaccaaaacacgaacaggagactgaggcannnnnnnnnnnnnnnnnnnnnnnnnnnnnnnnnnnnnnnnnnnnnnnnnnnnnnnnnnnnnnnnnnnnnnnnnnnnnnnnnnnnnnnnnnnnnnnnnnnnnnnnnnnnnnnnnnnnnnnnnnnnnnnnnnnnnnnnnnnnnnnnnnnnnnnnnnnnnnnnnnnnnnnnnnnnnnnnnnnnnnnnnnnnnnnnnnnnnnnnnnnnnnnnnnnnnnnnnnnnnnnnnnnnnnncccaagctctttcttgactgtttctataatagtaaaacctaatttcctaatttaaaaagcacttttcaggccaaaagtctagtgtttatattgtttattattcaaagatgtagcttgcctcttctcttactgtcttagtcagggtttctattcctgcacaaacatcatgaccaagaagcaagttggggaggaaagggtttattcagcttacaattccatactgctgtttatcaccaaggaagtcaggactggaactcaaacaggtcaggaagcaggagctgatacagaggccatggagggatgttctttactggcttgcttcccctggcttgctcagcctgctctcttatagaacccaggataccagcccagagatggtcccacccacaagggcccctttccccttgatcactaattgagaaaatgcctcacagttggatctcatggaggcatttcctcaactgaagctcctttctctgtgataactccagctgtgtcaagttgacacaaaactagctagtacacttacctagacccaccaacttacgttcactgaaaatcctgtggtcattttttcacacccggtaacttttctctaggctgcacgctactgtgtattttttttttttttctaggggttgtgggcctcagggcttgctggttttccatctcagtcctacacccagccggaagcccatgaacaccactccatctgacttcagttatctgcgaccctttcctctcccctcatccttgacattctgtaaccccctcttcttctgtttttccttccagaacaaacacacagcagcaatcaggaaaataacaagaatgacgaaaaccacaggcggcgacttccttctgacgagaggctcagatgaaaatgcaccccgcaagcccaatgcaccccatttcctgaacaccccatccctcctcctatcttttcccctcaataagctgcactgacataggagtggtttcacttgctgctctccaaaggttcttcatggactctgtccgtacctgatgcaaccatcacgcacagttgggagcacctcgacctgagccaacccacaatagtcttgatccctccctcacagtgatggcatcttctctccctttgtctctttctgctgtccctcaatctagggactatcccttgcctgtgcacaacatctttatctcatcaccttctggacccaccgtgaggatggaagaacttagacctgcaaagaaatgtcactcatctgagtcctggatgggtttttctagaaatgcccaatccagtagcactagagggacaaagcaggtggtaggagagggtttctttcctccgtcctcaagagaaaggactaactgtgattcacggttacaaaagacctgacacttgcactacaaatcagaccgggggtgggggaattgtagaaataactaagggggtaaaagcacttgctgttcttgcagaggacctgagtttcattcctagcacccatatggcaggtcataaccatctataactccagttctagggggtcagatgcccttttctagcctctgagggcaccaggcacacatgtggtacacagacatagatgtaggcaaaacacccatacatctaaaataaaaataatttttataaagaattagaccaaaatctctcatgtggtctctatccgagcatgtctgcagctggtttatgtaagaaccacagaaaggagacagaaaaaaaatgctaatgcttaaatccctcataatatatttcacacctatctatgccatgtactggtaccccaaagtacacaatatttccatgcctaaaacagggttttctacagtaacctcatcaaacaatctgtcttagttactgtccaattgacatgatgaaacaccatgaccgaggcaactttataaaggaaagcatttggtctggggcctatggttccagagagctagagtccataaccattatggctgaagggaatctggcagcaggcagccaggtgtggcactgaagcaataactgagaacttgtatctgacccacaaggattaaggcctaacttggaaccatgtagacttcaaacctcagtgactcacctgctcccacaaggccacacctcctaaccttcaccagggtccaccagctgggtctaagcattcaatcatatgagcctacgggggccattctcactcaagccaccacattcttgtcatccttttctaaatttgctttttgatccccactggagtttatgtgaacaataaaagcagccaagttgagtccatgggaaccttgctggcaacctattccttttctcttgctgtcaaacccatccttcacgtccttataagtggggtctgccagtggacccatggatctggtgcccacataaacagcagtgccaggatgcaggaaagacagaggaaggatgctgtaaccctgaataaaagacatgctgattttaactgcacatacaagttcacctttaagtctctcctgggctcactccctcattttttggatggaggaaacatcataaaacttgacattttaactaaaaattataatccctctaataacagttggcaccataccacgaccagttaaggaggataaagttctggacaacagcaaataatctatagctcaatccatcttcccagagctgcctgaggagcagctgctacacgctcttatgcaaaatgaaatgaatacgtacatgaacttggtcctaaataacatggcacagaccaacctaggaagcaagaaatagactttgaactcctgagagaacacagcatgggtgtccaaagtagaaacaaaactgagctagccataaaaaggaacctcaaagggtgcccagggaacggatggaagtgtgaatgtagatttaaccaaccaggctaagggagcagaagataagcacattatacaaccaatcaaccccttctaaaggtcggcctcaatctatactccgcggtcaatcacctggtaagggagagataatggcaagtgctgagataaccttgagaccagctctgagactattggagacctctgacctcttcctgaagtggaacaccccttcaccacccaatggatttggactcttcctgttagacaaatattcagtaaagaaaatgggtaaacagcatgggggaggggcagatgaacacaaagtcccaccccttagctgaggatcaattggcatctggtacctgctgggagaaggggagtcagtgttctttaatagtgtgatccctggcttattgaccatactgcagggtgggccccactcccaagagcagttgggcctgggaaagagaaagagagatgttgggtgagaagggggcgggggtgggggtagagctgggagaggtaggggaaggagaggggatatgatcaaagtaatcatatgaaaatctcaaataattaaaacattagttttaaaagggagatggctttaccatataaattgtatacttctctttcttttgagtcacagatgctgcaggtctatttagaatttgaaggcactgcaagtgcattggactagtctacattttcccttaaaataatcctctgtcctttcttacatttaaaatattttgctagtctatgccatcagtatgcttgtataacaaaatggttttcccatccctttttcattatttttttttttcagtgaaggactgggtgtggtggtaccaacctttaatcgggcagatctctgtgagtttgagggacagccagagctacgtatggagatcctttctcataaaaacaaactcagtccttcagtaaagactaatggggggggggggaagatgggcaaaaggaaccatgccaggaagcatcaactgaaatgcatcacttggagatgaggctggcctcaaatgagaggagagggtcgtgtgggaaaagctcatttgtctttagaggatgagtttaagtaaagacctttaaaaactctgggccaggtggtggtggacaccattaaccccagcactcagcaggcaaaggcaggcagatctctgtgactttgaggctaccctggtctccagagtgaggtccaggacagccagggctacacagagaaaccctgtctcagaaaaacaaaacaaaaaaaacggttctcactcaaagtacagcataataaatgcatcaatatattaagaccatttaggtcaaatccagcatccaagactttgactgtctccaaacacacctctccttttctttaacgtgtgctggttggtttagggaagatggagaaaatgtctccatcggattgtcctatagtcagtgtgtggagcatttccttgattaatgattgacatgggagggcccagcccactgtgggtggcaccgttcctaggcaggtgggtctgggttgtatataaaaactggctgagcaagccatgggagcaagccaataagcagccatccccgcacccctaatcctttgtggcccctgcttcagtttctgccttgagtttctcttctgatatcccatgacccgagtgtaaaacaaacccttcctctccaagattacttgtttcttttctttttcttttcttttcttttctttgcttttctttttcctttcctttcctttcctttcctttcctttcctttcctttcctttcctttcctttcctttcctttcctttccttcccttcccttcccttcccttcccttcccttcccttcccttcccttcccttcccttcccttcccttcccttcccttctcctttcctttcctctcttttcttttcttttcttttcttttcttttcttttcttttcttttcttttcttttcttttctttcttttcccatttcaacaaagccatagaaagcaaactagaacacaggtgcacaagaatccctccaaaacccaacaggatgtttacccctcctctaaaatgttcttcacattcagctactggcttcctcagagtcatctccttcccagaagaaatggttgcaagtctgctctcccctcagccacagtaacccttccctaactctgctcttcctttgaagtttccaagctccctcccacctactccatcccatcctgatacacccacacagcctctgagaaacaggagcaatacatcctggttctgtgtccctcacaccaaggttggggaccacacagcaggagagcatggtgtctgcgcccaccatgctctccaatgtgacctcaggggccattcactactgaggaatcagcgggatcaagccagaataaaaagtgtgtccggatgctctgcctggcaccttcagagtacatcatcattgtcgcagcagagccccagggaaattccattatcacagagttttacagtgtttgcacaagctgataggtcataggtttttacagcagacaggatagcctcatataaagcaaataatttattggttacaatggtggagtactcttggaagtggggtgagaagaaggcagggataccatgaaaacacattccctgtgaagatttatttgccctggtgtgcaaataaatcatttattagatgaggatttagaaatagccaaggtgtgtttgcagactcaccatgtgacttaatcctcctatgcagaagacagaaggtcggtgctccacatgcggtaggtttttgcctgagccccatggaagtggaagtgaaagtggggtagagaagaggtagaccagagggacggcctgcaaacacctggatccatgacaaggagattgtcaaggttagagggccatgtctaaggggctcatggtggtgctaaaaatgatctcctgtgactttcagacaactgtggtgtctttccccaaagaacaccagggtcctttgtcactcacacaaagaccccttgcctcccttttccagaaacagctttgacctgaacaaccatgttctgaggccattagtctgcccatgtctctaatcactccttgaaagaacatgttatctctcactgactgagagagagagagaggggagagaggaggcaacctggaagagacttagctcagcctccttgaattctcaccaacactttccagtatgacaaagggctgcctgtccactacccaccttcaggatccatgctgtaccccccccccccgcactccttccctcttgcccatcatccaggagagcttcggactgtctaaatgcttagagagatgaaggtttcttagaacctatcaccatctcagagagggagccagacagggtgaccctgccttgcctcccggcatgtctcctcctggataccagcaggtctctcctgtgaatcttgctccagatgcttcaggggtctgagggtccttgaagaagggttggatggacatttaaggattcagaaaactggaggcaagaagactcctccaggaaacttggggagtaatccttcaaatgaactaagacggaaggaaagaccatccagagactgccccacctgggtatccatcacatatacaaccaccaaacccagacactattgcatatgccagaaagactttgctgaccggaccctgatatagctgtctcttgtgaggctatgccaatgcctgacacacacagaagtggatgttcatagtcatctattagatggaacacaggacccccaatggaggagctagataaagtacccaaggagctgaaggagtctgaaatcctataggtggaacaacaatatgaactaaccagtacccacagagttgtgtctctagctgcatatgtagcagaagatggcctactcggccatcaatgggaagagaggcccctgggtcttgcaaactttatatgccccagtacagggtaatgccagggccaagaagtgggagtgggtgggtaggggagcagggcggggagagggtataggggactttcgggatagcatttgaaatgtaaatgaagaaaatatctaataaaaatgggggaaaaaaggtctcaaaactaaagacaaaataggattagaaaatagggcttcaatgcagacaatagagctgtagtaattacatggttacaaggtgcagccaagagctggggcaactgatttctttctttccaaactatgtgttccagttaggagccgactgtttgggttaatctcctgattgctttgcttatgcttaggattcaggatgagctacaggaccccttggttcctccgtttcctcatctgacagtgtactggatggtaacccatgtccttaattttttgagattacataaattaacatatgggaaacaagggtgtctatagcccatccatttagccaagtgcttgcaagctctatcacaatgtatctgatgctttgatacactgtcatctcctggctagtcctctattcacttaagaaagaattgaatagacagggacacagttcaactttcggattctcattcactcaggcctggagataccctccacagacattgattaaatctgcctcatccagatggggaatacacagcatgaacagcctcagctgggcccttccattgtagtgccaaggaagtgtttgatcctcaaaaaaaatagacag

SEQ ID NO: 1115 - DNA, 1330 bp, Mus musculus
atggtggattgcccacggtatagtctatctggcgtggctgcctccttcctcttcgtcctgctgactataaagcacccagatgacttcagagtggtcggtcctaacctcccaatcctggctaaagtcggggaagatgccctgctaacgtgtcagctcctccccaagaggaccacggcacacatggaggtgaggtggtaccgctccgaccctgacatgccagtgattatgtaccgggatggagctgaggtgactgggctaccgatggaggggtacggaggccgggcagagtggatggaggacagcactgaagagggcagtgtggctctgaagattcgccaggtccagccaagtgacgatggccagtactggtgccgcttccaggagggggactactggagagagacaagcgtgctactccaagtggctggatcttccccaaatatccatgtggagggacttggagaaggagaggtccaacttgtatgcacgtcccgaggctggttccctgagcctgaggtgcactgggaaggcatctggggagaaaagttgatgagtttctctgagaatcatgtgccaggtgaagatgggctattctatgtggaagacacactgatggtcaggaatgacagtgtagagaccatttcctgcttcatctacagccatggcctcagagagacccaggaggccaccatcgctctgtcagcttccgttagcgtaatcggacattcccagcccagccctgttcaagtcggagagaacatagaattaacttgtcacctctcacctcaaacggatgctcagaacttagaggtgaggtggctccgatcccgctattaccctgcagtccacgtgtatgcaaatggcacccacgtggctggagagcagatggtagaatacaaagggaggacttcattggtgactgatgccatccacgagggaaaactgaccctgcaaattcacaatgccagaacttcggatgaagggcagtaccggtgcctttttggaaaagatggtgtctaccaggaggcccgtgtggatgtgcaggtgatggcggtgggttccaccccacggatcaccagggaggtcttgaaagatggaggcatgcagctgaggtgtacgtctgatgggtggttcccacggccccatgtgcagtggagggacagagatggaaagacaatgccatcgttttccgaggcctttcagcaagggagccaggagctgttccaggtggagacacttctgctggtcacaaacggctccatggtgaatgtgacctgctccatcagcctccctctgggccaggagaaaacagcccgtttccctctctcag

SEQ ID NO: 1116 - protein, 444 aa, Mus musculus
  VARIANT (1)...(444): Xaa = Any Amino Acid
MVDCPRYSLSGVAASFLFVLLTIKHPDDFRVVGPNLPILAKVGEDALLTCQLLPKRTTAHMEVRWYRSDPDMPVIMYRDGAEVTGLPMEGYGGRAEWMEDSTEEGSVALKIRQVQPSDDGQYWCRFQEGDYWRETSVLLQVAGSSPNIHVEGLGEGEVQLVCTSRGWFPEPEVHWEGIWGEKLMSFSENHVPGEDGLFYVEDTLMVRNDSVETISCFIYSHGLRETQEATIALSASVSVIGHSQPSPVQVGENIELTCHLSPQTDAQNLEVRWLRSRYYPAVHVYANGTHVAGEQMVEYKGRTSLVTDAIHEGKLTLQIHNARTSDEGQYRCLFGKDGVYQEARVDVQVMAVGSTPRITREVLKDGGMQLRCTSDGWFPRPHVQWRDRDGKTMPSFSEAFQQGSQELFQVETLLLVTNGSMVNVTCSISLPLGQEKTARFPLSX

SEQ ID NO: 1117 - DNA, 32373 bp, Homo sapiens
attcttcttccactcttcacagatcaggctacagtccacatctttaactgaactccttgtcactgacatgtgttagctccatgttgccaaatccaatggtcatctctaggatgtcattttattcatcatatcagaagcattttatgtagttaaccactactgcatcattgatgtattttcttgacttgttactaaacctcactgtcttgagattctcatcacacgagaataacagccagatctcagcctgccttgccaagtctcccatcttcccaacctctaaatgactgagggcccaggactcatctcttgcatttgtttcctatgcatcttcattccagaatctcccatggattcccacaactaagcacaattctttgttgaagtttctctaacttacattactagccttgacatgttgcccatagctttgaagcatgacttgaaaccaagctttgcatatttcttctgtcctttttcaaataagttttggctattgtagatcctttgtattttcatataaattttagaattgtctattgccacaaagaaacccagtgggaatattgatcaagatcgtgttgagaactgttatttcaaaaatatcaattcttcccaaatcaaaatatattatatctctttacacatttagaattttatcagtttctctcatcagtattttatagtttcacatcacacatctttcggttcagtttatgtctaagtattttatgtttttattgctgtcataatgaagtgatttttaaattttatatatgatattctgctgtggtgtatagaattacaatttgtttttgtattttaccattgttaaattcacacattctaggcattttcaatagctctcttagggttttatatataagcaatcaagctttccaggctgtaatgtttactgtttgccaaaaggagtctgaaattatgtgaaatctgctaggcttaaactaatttttaaaataataaaagttgaaagaaaaatccaggtcaatttaaaaaataaagaatattttaaaaatagtttcccatgcccaattttatgttaaaatacaaccagacatagttaaatgttttatatatggtcatgaaactaaattgtccccaattattttcatattccagttcatatcaatttcaatggctaggctatcctttggggtatagttttcctttcatcctgctaacccattaattatccttttctacgtgtccacaaatgtcagaggtgtttgagccggagcaactccatcttgaataggggctgggtacaatgaggctgagagctactgggctgcattcccaggaggttaaggcactttcagtcacaggatgagataggaggtctgcacaggatacaggtcatgaagaccttgctgataaaacaggttgcagttaagaaacgggccaaaacccaccaaaaccaacatggccacaagagtgacctctggtcatcctcactgctcattatatgctaattataaagtattagcatgctaaaagacactcccaccagcgccatgacagtttacagatgccatggcaacatccaaaattaccctatatggtctaaaaaggagagaagcccttagtccaggaattgcccaccaccttcccggaaaactcatgagtaatccaccccttatttagcttgtaatcaagaaatgctaaacctacatgaagtatgaacgattccttacattccattccatgcaccacatcctccctgaagattgtcttgattccttcatagttattgaattattataatattagtgcctatgttctctactctcaaaagtgcaaatgacattaataactgaacttataatattttctgctttgctaccttaagaatgagtgcctggtattgcgacgtgattacaacgaatttaagacaatgaagcagtcctctctccctatctccctcatatcctctctggctctctctctctctctgtccttctctcctcctctctttcccccgcattctcccagggtggttcagtggcagaattctgctgggacctttaagagagagaagcatattcagcagcagcagcagttttcctattcctgcccccatccgcggctttgaactgagtttaccacgaaatacaaaaacacaattttagaaagaaagatattggcagttaagatttgggaagtttctaaatgggactctcagtccttcccgccactctgaaatcgcggtgcagtagtaaaatcttggaggcggttcttgaacaaacctgtcatctactggccatgtgtggaactgcaacagcccggtggggaatgcacttcgcagagatggagatcctctcagaggccccaagaggaccaagtaaaagaacccaggatgaatggcaggctggatgggtgcaaatgcaggaggcttagtagatcggtatgattttctttgccttctttctcccaatatttggaagggtcccctatttccagtgtgagacatgcccggatatctctgtgagtgcagcttctttggggtcctgggaggagtgtgatggtattaacacattctgtacaccctctccccgcaattccccaagggggcatctgcattagttttggagtcaactgaggtgggcttcaccgaagcttacatctcttcctgggaactttagtcttataggctcccacctgcagtagaatcaattttaggtaatttcatcattttcaaaaaataatagatgatcattgtgattgtcttaaacttctgtaactctttcataaaagtaaatttaaaagtaaaaatttattttattttattttattttatttattttttgagacagagtctcactctgttgcccaggctggagtgcaatggcgcaatttcagctcactgcaacctccgcctcccaggttcaagtgattctcctaccttagcctctggagtagctgggattacaggcgtgcaccaccacgcccagctaatttttgtatttttagtaaaaacggggtttcaccatgttgcccaggctggtctcaaactcctgacctcaggtgattcacatgcctcggcctcccaaagtgctgaaattacaggtgtgagccaccacacccaacctaaattttttaaaattaaaagttttagaggaactggtttgtcagacactttttgtaaagtatatgacagccatgtatgtaaagagctcaacttagactgtaggtcagccagaactaagaatacctcagtcctccatccctaaatgtttgggcattttcctattcagaagttctactgcctgcccttcctcctttcttctcttttctttcttttcttcttttttcttttcttttctttccctccctccttcctcccccctccctcccttcctccctttcttcctttcttctttccttctttccttctttttgccaatcaagaaaaatggccagaggtgcagattgaaccgtggccacgctgtgaggaaaggcctccgtcctgtgagcaccaccctcccctcactggcctcgggaatcccaggccccccactcacatctgggggaggagtcgcagggcttctgcaggtgctctctctcctccagtcagtcagcaaaccgaggggactgtggaggacaagccactgtgcctccaggagatgagagctgctgatttttctttcctttccctgaggaaacgatacctgtataagtctcactgctgggagactccacaaagtaatcatctttctggtgagttgatctaagagctctcaaaacatctttcaaccaggtccccaagaaacagctgatggcgtcgcctgaacttctccatattcatagcaacactttcctgacatttcttggattgaccttgatttcttatcttcatttctaatctcctctatttttctatccaccttctttccaagaccttccattcccagtaatgacacctaatagctatatagggattttgtatcatgattatattcttactttatccttacaacgatactttaatgtgagccacccacatactatccctgtgtaaaaactaagaaaattgagacccctggaaagaacagacttacccaaagtaaagcttgcccaaatgtatagcaaagctagaatgaaaatctcagtcagcctaaactcagggcttcttttgtcgtctagtggctgagggagttatgaatgtgggtcacaggtgaccgccgcatttgaagaagagtctgtaagtgaatcgacttgcggaacatccttgaagccgacagtgagcccgtctctgctgccctctggtggccaggcagatccatgactcccctctcctgttcctcctgccctcgccggatgcttgtttttccctctcctcagttctagcagcttatgccttgttttcccgcttctcctggaggtggactctagtcagaatggcagagattgtgactcctttttttctctcccacacaccaacatcttcctgcacaaaatggcctcccataatatgtagcataatttaggacacagttctcagcacaggcagacctctgagaaagtgtatgcagatgatttgtgagaacacacacacgcgagtgtaaacggagcttctttacgcggtgagttggcgctgatgtgactgaccataaaaaattcaaataattgcagcatttggtaccatagagatgatactacagaatgcatgcaatgagcggcatcttttcacacattcaggtgtataaagtaaatttctatattttcctattacggattttaatttgtatgccaagcattatgatgtcttctgacagaggagttcatctggtaatttccagataaattcagtggctttcacacaattaatttaatagcagcctcttcttcacccgccgtgtgatttctaagttctgaggtgggaggtggtgcagggctggtgtagaagtctctcctcacatttgcatcatcagctcccacaatatgtcactatcccatcgtgtttcctggtcgtcactgtccttcccacagtggtgacgatcactgttatgtccttgatgccactctcctcttgctggaacattccatcccagcattttaggcagcaaactttcatcccactgttggagccttccagagtctgccacttcttgccttggagaacttttcctttgctgccactctgagagggacatctgtgggcatcgctaccattctgggaaccggaggtgaagtggggttcattcccctctactccaattgagagagaaccagggtaaagagaccctcctatcctcgtccatgtttaattgtttctcttctctccaaatctctcatcctctacagtgaggggagggtctttgtctagactgaaggatggagggggaaacccttacattaagaatcgtaaccgtaagtcaggggacccaattatgggctgctcataacgggagggaaagaaacttaaggaaaaaatcggctcaaaccttgtaacatcataatgctgcatatgcttttattattacattgacatgaaaatctgcaattaaattaaaaattgttctggagaactcttgaaatcctgagactatatctgagaccccctctagctcaaggaacacagacttaaggggaacgtaaaggaaaatctggcagaaacaaaaacacacacaaaatatgcctatcattatactcttcatgcccaaatattatgctgagaaggttattacatttctttggtaaacatctgagagtaattaaaccttttattactcagcaaagggagataaagtacctgagtaaaaagagcaataaagtagcccacaagggaccttggcccagagctctgatcctggagagggcagttcctttctctgggtctctgttttctcatcagtggaatgagggatggcacgtttgatattcagttttgcttccaactccagcccgatgagtgccatgctctggtggagacttggcactagttgggaatctttgatgtgtggcaaggtggagggaagggtggatggcacccgctgatgtgtgggacggtggggtctgtgtgaggacctaactggggggttgcagatgaggcctccatgaaggccttggctttctggggaaggtgagaattgccagtgtcatgattttgtgtgcacgtctgcagaattcacaactgaacccagccaaagtccacttgtccccggagtttcactgttgagaggattatagctgttaggaggtgaatgtgctattctgattttcggaatgcaatctcattttcacagggcctccgggatttggctctgccttcaactggggtgagacggcttaaatcctccttcacccaaagtcctggaggaggcctccacactctctggctctcccacactctctggctctctggtgtgtctttgatcagcacaccccagggctctgacctgtttctgaccacctgctatgtggatgaagatacatctggggccaagtgagaagacccagtagcaccaggtttcgccccaaaggagagagggagacacgtgagtggtttggattccctggtgaaggatggccacgggaagctggggacattgtctcagattacagagtaggacatacggacggaatcaatgtcctttagggaaatgctgccacctgttacactgcctcccacttatatttatatcccactgtgcagtcttcaaagtgcgatcgtagcccatttgaccctcacagtgttctcgtgaagcaggctgagtgaggaagaagcacgaaattataaacaagaaaaccaggatcacattttcatttgtcatggatgatgtggggcatgtgtccctgagccttaacgtcttcttctgtcacatggtcatgacacagcttggaaaacgttaggatgattgtctccaccacacagcagagaaaatacaggctcaagaaagtaaagaaagatgtccaaggtcacacacacacacacacaaaaacccaattcactttgtctcctagaaatcttattttagctttctctataaaaatgtattaacatatgataaactatagctgtttttaatgtctacatagatacataagctttcgacttcgtgaactaagttaatttattcttaccagtcagttactatggctgcttggcattttgaggagcaacatttgaggcttttactgaaaaaagttctaatgacccatgatacgtagtaatttgcaattttctttgatatgagttttagcagtgcaggataggccttgaaattcagaattgttcatcatctaatgcctaaacataagctaccacttattattacaatttaacacttaaactttatccagaaaattaaattaaattaaacatgggtttttgagaatttgatgatacatttgcatattagatcatatatcttgacaacaccaaaatttactatatttaataggaacagcagtttcagaagattcttgcattacatccaaatagtaaaacggaggggtcaaaagcttatcattttaaaaggtttttacttaaagatggcaatttaagtctagttatctattttcaaaaaatgtgccaaagcttttcagcatcctgacagcaaaccctgtggcagggcatttcctcggcaccaccggccttctgggctggatgactctttgttgtgggggctgccacgtgcctcatagaatgtttagcaacacccctggtttctactcaatatatgtcccctcccccagtcgtgacaactgaaaatgttcccagacattgccaaatgtcctctaagggcaaaacagcctctttccccattaagaaccctggtccaaggtggttatcctccctgatatattctctcacaatctatctgagcactggagatggattctcccaacattcttcgaaagcttcattgatttgagcaatttttttgagagttcacttgtagattttccctcccaccgctttgacatgaaagacctacaggaacacaagcctctgaagtggtctgtagcaagtgtgagttcattttagttcacacggctgagaaatcatgcttggtatggatgttgtggggctttctttactcttacttggtggaaaaaaatgttcctgcttttcacaaaaggagtcaagggaggcatcagcaacacccttcagtctaaggggaggtgactggtaagtttcaggtggcaaggtgctcatggtctgcactgtcttctaacacccaaccccattttcacataaatatcatactgcccttttcgatctaggtattgtgaatgggctcatataagtttccttaaagatatcttatatgaaagtacatattttttataaagcaaatgggcaatatttgtgtaacaacaatctcctgactcatttgattgttaaatctccatttcagaatgttgatttttacccctgtcccataaaatcttactagcagtagtttcttggaaagggggaaactgtaattgacttgacattgctcctgagctggtttctctactttgtgtgaagcaagttttctttcaataaaatacttgacacatcacatataataagtcttagacttctttcactctgaagtttgtatttttcaatggtaaaactagccttctatccttgtcctggtaagttttaaagtttttagctgtgtgaagtatttttgttcagctgggacagtggggttgctgggtttgccagtttctgccagttgggctttttgtttttttaattcattcgtgtttttaagtctattctaaaaggccacttacagatattttcccgactatctttctactactctttctttcactttccacggcatctctgtgtcccgggttctctgagcgctagcactgaatgttggctttctggctgcagtgtggagacgcagagccttcctgccctttcctccatgtgtagaaaacagtggtaaagaaaggctttgcaggaggagttgggaggaggacaggaaaaaatatttgaatcttgctctataagttttgcaagctcacaacagatgaacctaaggagttttgtttgctttggtttggtttggggtttttttaatattattgttcctttacctcaagtgttttttcatttcagtcacaagacttccttacacctaaaaaattgcttaaaatattgtctcatgaaattagggttgttgaggcaggaataatttcataaagttctattggaaggcaaatgtcaggactgatgtaggaagacacaccaacgaagttgagggtggtccaaagtctgttacaagttggaaggcttttgtaaggaagttcaggcagaaagaaaggggctcttcatattggagttgtcttttttcactggagggtacaatacagaggttacaatcattggacacagatgacaatatatagactaaaatatttcatgcacaaaacaatcagtaaaactttatgattcagaaacaaatccatatccttttcgatgtcaggaggttacatattaatcactacatcaaattagctcagaagctacattgaagccgaactacatcaatgtatgggtgtatgagcagatcgggttataggttacagaggtattcttcaatcagacgttatcttatgtgtaggaaaaggcaaggactattattccttatcttttaaggagtagagtgactcaggcaagagagatgggaggccgtgtgctcaatcttgttttgtctttgaagcatctttctggagaactgcaggtcatcacagcaggggctttgtgaaagtatgctagcaagccgaaatgagcaagcaaggcttcttacatttgctacattgtctcacagtataacacgttaggtaaagggttggatgtgatcagtaattgcagagaaatggagccaagcccatttcactgactgtgcaggggttgatgtggattctctgctaagactgcataaccaatggaagccatggagtgtgccgggtgtgtcacagcctcacttaggcacagcgtttccttgtctttgttccagggaggatggtggattttccaggctacaatctgtctggtgcagtcgcctccttcctattcatcctgctgacaatgaagcagtcaggtaggattcccttctccctttactgtatagtctaatgtcccagtgagctagtctgggtccaaaggtcgagaacaacatctaagagtgtaagtctggggccaagccacctgtatccaaaaaggaactcctcacttttgaggagctcctccactcccaggagctcctccactcctagctgagtcacctttggaaagttacttgagcacctcataccttagttctttcatctttttaatgagaataacagcagtaactacatctcagaggccagcacaggctttaggattaaatgagacattaaaagcacttgaatcagtggttgcaccacgttaaattattaattcactctagtactttggggtcaagaaatgcagctgcttcttatcataaattaagctgcaattaaaaaaaatacttggaaataagaaattagaagaaagggactttggaaatctcactagctgaattttgacgtcaaaatgttgcaccttgaaaaataattatttaaaaattcagtgtcaaaaaaaaaaaatcagtgtcagaaggagatgtcagagccctaaggaaaatgcagcatggcgaagtgggaaaaaacacgacacagagcatcagagggcgcaggctctgcctcggcaccgcagagctggtgtgtctgcctcggtgccgcagagctggtgtgtctgccttggcgctgcagagctggtgtgatgtgatgaagctgctggcttctctgtgcttgtgctgcagctccctaccctgtaacagtcaatctgatggaatgtcttcagttctagcttcatatttagacttcatcaatgaagaatacaagcagatctccacttaggctctttagccaccttttgagcagcatctatttgatacccagcagcagctaagtagggtgaggttcttcctagcaggattggatctgcacagagaaagagcaaatggccccggagcatttagaatgagaaagaacatatcatacatgacataaaatgatcaaacataataacatacataactgttaaacatctcttcaatttgcagataacaaggaagagatcagacatgtcttagaatttgtttggaagacccaaaaatctctagacaaaccagtgtccttaatccagcacaaaatgtccttgtgaaaactgcattgtacatagtcccagtaattggcctcctgccaactccagacgggaaaaaaacaaacaaaaaaaaaacaaaaaaaaaacagtttttatatctaagagaagaggaatcctgaaaggctaaaaaaagctaataaatggatttattatctaaacttcaggaaaataaaatgttaataacaagaataaggtttccaatttaaaaagtcaatttacatgagaataaatgactcaaggaataaataatttacttgagaataaaaacaacccaggtatgctggtattaatatcttgaagatgaagaaattaggacttcaaatctcaaaatcttaccaagagtaatagatttgccaccgaatcacatagctggtaggtgacagacagcaacctcacccacatttttgaactgcatttgttttcagtacacaaaattgactctgtaacaaacagatgtgcaaatcatcatgctggatttctctaaaacattaaacatatatctctccctcttctagttgcctccattttgacaggctggacaccccaaagcatgcatatgattttctgattggcatttcctcgttcctctttttcacttattttatagaagactttagagtcattggccctgctcatcctatcctggccggggttggggaagatgccctgttaacctgccagctactccccaagaggaccacaatgcacgtggaggtgaggtggtaccgctcagagcccagcacacctgtgtttgtgcacagggatggagtggaggtgactgagatgcagatggaggagtacagaggctgggtagagtggatagagaatggcattgcaaagggaaatgtggcactgaagatacacaacatccagccctccgacaatggacaatactggtgccatttccaggatgggaactactgtggagaaacaagcttgctgctcaaagtagcaggtgaatatctggggaaagacacagggtctcaagaggcagagatatattaatttgtggtaagctttgtgacagttgaggaaatccttttgaatcatcaaggtaattcctaatgcttagtcctctaccctgattgatttaaaaataagtggttctggagtcttcaagcttagtgttaaaatattttcccaaatttaatttgcacagttttgactgttcttgaggattatttggaatccatgacatgcagtctttagcaattttgctgagacacacatttgtgctacctaaggctggtgcgcaagagcaaaccaattgctgcatgaatgagcccagctgacgtccggcatctgtatctcagggcattggtttttctctacccaatcccatctatgcagaaactgagacgtgaaaatgttctttccttgtgaaatgccctcagttagaaagctatcaacaagactgaaaaggctaagaatgtcgtgctttggagattgttatatactagtgttcaatgaattggggactcacagatgcttttggacacaccctctgtgaatgggaaggttcttcatattgctgttgtattagctaagcaggaaggagtagggaagaaggggacaactgaagaatggatctgtcttatgaaaagtaaactatcatatgattccctgacagggctaacttctccatgctctaaagagaaaatcaagtaaatccaattactaaggcaaatggggaaaatagttctctggagatgttaacgtctccagctgatactgcttccttctttacttccctggaaggctgtttcctaatacctttttttttcttaacatccattactgttactgtgttcaaggtgattcaaaatggatggaggaatacatatatttctgacatggggggacagggaacgtactgatgtatttcaatatcaggaacatttacaaataagtcacacattttctaagggtccaagggaagggagtggatctctcttttaccagcaagtgattaagacagaattcccatttatggaaaatatagtccccttagtttgggtgtgggagtttcacgttaaatagagaaaaaaaatccatgatttcataaactgttgtaaactaggatttctcaaaaccatcttacccattgaatagaatatttagctacaaataacgcctcgtggagattcgcatttcacatgctcccgtttatccacttgcttccgaagatcacagccaccagcaaaagatgcaggaagaacaggcccctggggagtgatttctgactttgtgttaaatcttcaatcaaattggagttcaagacatcatctaaaataccagacaatgtgcccaatacagataattttaagatgaaaaaggcagagttcatggcacagaggaattaatgaataaattacagctcatctctgtttgcagtgctagaggcgttgcaaaatgtcatgatgtcccccttctccgattcccctttctggatctggagaaaagtactggtcagatgctaaaatgtaaagacccagactggggaacaaataaagtgtatctgaactcacatttgaatggggagactgaggtcgactttctgctcctcagactcctgaactccggccacctccctgtgagcaacgtcactgggatctcagcctctgtgatttctgcctctgtgggctctgggtgtcagagctgtggcttccctctgcaggtctggggtctgcccctagcatccacatggagggacctggggagagtggagtccagcttgtgtgcactgcaaggggctggttcccagagccccaggtgtattgggaagacatccggggagagaagctgctggccgtgtctgagcatcgcatccaagataaagatggcctgttctatgcggaagccaccctggtggtcaggaacgcctctgcagagtctgtgtcctgcttggtccacaaccccgtcctcactgaggagaaggggtcggtcatcagcctcccaggtcagtgctctgcctctaggacccacatgctcagatcagcaggagaggtcccagggactgcaccatagcacctcgtatttttatcaagagacattatctatcatatagcaatatgtattgaaagccataaaacatttatgactggaaatatacgcactacattttacttgaatagctgttatggcgcctgcgttatttttgagttctacctttccttcttctgcattgattgtttttactcacaagtattcattgcattgtaaagaaaataaagctatatttcttcaactgaaatgttttcctatgctgtcttgtgctgattacttctagaaatctatcatatgaagataatcagagatgtagacaactatttgcataatagaatattaattatggccttatttataaatagcagcaaaaacaaccaaccccccaatacaacagtacagtgtggaatcttgtcttactatacattatagcattaataaaaagatatttttaaataattttaatggttgaaaaaaatcctcatgatgcactattcaatgataaacatgacatctacctataaattgacatttccaatcacataaaagttactggccttaaataacttataactgcactaaaactttcaggataccctccacatttggatataagtatacagttattcatataaatggatagattaaaaaaactttaaagttaatgttacattttaattttaaatgaagctgattgtatattacatataattcgtctctctactttgtaatttaggtgatactgtttatgtccatataattttgtactttctgtgtatctataaaaggaacatatgttattttcatgctgatagctaagtatttatgctgtaaatatcagaagaaaccaacagaatcatggggagatagaagtgacagcatttttgttgtgcagagaaaaggaaaaaaagctgtatcattgggtaatctgtgggaaagaatcagtatttttctgcatttcatttttttaatgaattgagcttccctatataatgtataaattgctttcttttttaaaaaatagtttctctcctttcccttacaccaaattccttaatatgttattcttgttctttttccagagaaactccagactgagctgggtaagtacgaggtgctggcacacacctgtggagggagcctctgccctccccagcagagggaggggagctaccacgagaccatgtgacccagaggaaaaactgaggcacgattttaccaggtcctatgttcattaaataccagaggagaccagcaaagtaatggcctcattcaaggaggttgcagctgtgttacctgacactttgggggctcatggagattccagtgagcatcagatggacacctataggaagcatggcatcatctctgttctatgtgttgaggggaaagggagctgcctcagaatgtgtgggggatgacagcagacagctggccggggcctggaggccctttgaaaacatttcaagtgtgaacaagggcagcatcattatgacaacctgggttgcacccagcacctccctgctcaactctgctatggggtcctgcacctgctcctcaccccagtacacccctaagctaatcactattgggagggagctgttactttctgagtgcaacctgggatactgtgagtgtagcaattttttttttttttttttttgagacggagtcttgctctgtcgcccaggctggagtgcagtggcgcgatcttggctcactgcaagctccgcctcccaggttcaggccattctcctgcctcagcctcccaagtagctgggactacaggcaaccgccaccacgcccggctaattttttgtatttttagtagagacgagatttcaccgtgttagccaggatggtctcgatctcctgatctcgtgatccccccacctcagcctcccaaagtgctgggattacaggcgtgagccaccacgccgggcattttttttttttttttgagacggagtctcgctctgttgcccaagctggagtgcaatggcgccatcttggctcactgcaacctccatctcctggattcaagctattctcctgcctcagcctcctgagtaactgggactacaggcatgcgccaccacacccagctaattttttttttttttttttagtagagacggggtttcaccatgttggccaggatggtctcgatctcctgacctcatgatccgccggccttggcctcccaaaggtgctgggattacaggcatgagccactgcacccagcctaatttttgttttttaaatctcggagttggactgagggtattattttgctgcacctgagataagtggtttaaaacataaccagccgatggctgagcccctttgagtttcccctttacctccttactagctccctcctttttatggcctcttctcccagcccaaggcaaccagcctgcctccctgcctaggtgcatagaacgtggatcccttatgtgctctttccatcaattccttgctctccatcaagtcacctgctccaggaatgtgtatccatgtgtgtgctttaggtgagcttaagcacacctttcagcccacaaaagagtttttgaggaaaatcagggtaacaaacacaacccaatctctaccagagtctactatggcaccttcaaccccattaggccataaacataaagggaagggtccctggaaggcgcaaagtaactccacaatctgaggagagacacacacctgtgtatcttacccttctgagatcaggaagtaaagccagtgtttggggcaggttgacacaagtctgtctctcaagaaggttttaggagaagagtcactcctctgagttctctgagacccactggagacccagcacacacaatacgaccccatgtcctgttgttcctaagtcatggtaacctccggggccacaattaaccaacacggaaagatggagcttccctttgcttcctgtcaggtgggagaggagggctctgggcacggaagctttgcaggtgagctctaatgatgggacacccagctctctatggaagtcctaagactgaaatcactgcttgtagtcttacaaataatgtttttcatttataaaaataatagtttttaaaaatattaattgtatgccaggcacgatgctgaatatgttatgggaattatttcattttttcttacaataattataaagtttaattgctttatcctcatattacagctaagaaacaatcttagagacatacatggtttgccaaaaatcaggaagaaatggtgatgtttaccttctaatctacatctatctaacttaacagtgcaagtccttaattacttatgtgtgactttgtcagctcattcatctctatttttctcatctttaaagtgaacaggttgaatttaatctctaatgtagtgtccagttctaagagattagatataacttagcatatttgagaaatgagatagtgcattaattgaatatgctgattgaaagaggattatgtggtatgatgatgagattatcaggtttcaaggaatcagtgtataattcagtgtacttcacgctccagaagggaattaatttttcagtggatattcagaaggcattcagaacatacaaacaataaccaaaacaaaacaaagcaatatatttcagcacaaaattgtctggaaggctgtgtacaaaaccgtatagaaaaaggaggttaactactgcatgttcacacttataagggggagctgattggtgagaacacatggatgcatggcagggaacaacacacactggacacctgttgggggatgggggagggagagcatcaggaagaacagctaatggatgctgggcttaacacctgggtgatgggatgacctgtgcagtaagccaccatggcacatgtttacctatgtaacaaacctgcacatcctgcacatgtaccccggaacttaaaattgaaagaaaaaaaaagtgggttaggcatagtggctcccaaggagcttgtattctagtagaacatcaattattaacaaacagggctgcatgatttttttagcactttaaactttagttttacttggattctggacaaaaggagttttgtctgtatctgtaatgcatcaaattaattgaatctccatacttacattttgcttccttcagtctccattgaagtcaattttagctcttaattacctatgtcaggcagggcaagccagtttaagatctaatatgtgcacaggtcacacacggacagggaataaaatcctcatatggataaaggagatgaggaaacagtctgttttattaagtaatttaccgtaagccatgtggatgcagaaacagccccaaactaatccctagtccattttttctgattcttgtcttcagactttaatagatacataggagaggaaaataatattgttttaggtaaaattacaggacaaagcaaacaaaatgctggaaataactgggagtcaactgttacctggaatggaaggtaataatctgaaaattcaaattgtgttgacagggactttcctctctacaaaggtagctggcagttttcggccaatgacataatgggatgttaacgcctttggccagtgactctatgcagagaaccaacaattttatgcttgtgtttctattataaatgatcacaccttatgcaaaaccattcttatcatttaacagaaaaggacgacacttaatttagaatagagaaaaaatggcacgggcagggcctgatgagaatggaaaatgtaatatagcttgggcccaggaaagccctcagagaacatctttccccactttgcacagtgggagaattagaccccttttttacattcatcattgtttcacaatttgtactttgccgacttccccaattattgatcttaaaatgttaattttaattttcaaaattatttgaggacattcaactggtgtgtgtctataactccacctatgtggagcattggggaaataaaatatagcggctggaccagacttacaaggtactataaagtccacctagaggaaagcttcttcaaatatcattaccaaaagtccacatgagacacgtttttaaacccctccctattaccacgtcagagggtggggatggctccaacgccttcaagtctcacaggtctgtgcacctctgctcacgctgcagggtcttccaggcacttaatgcaaactattttgttcaactctgaaacattatgattttggtagttgtatagcaaatttacagtttaagaaactgaggcattaagaagtagtttaagacagattaagaagtagtttaaaatcatacagaattgaagtgttagaagaaaaactttagacagactaaatttagcagagtctaactgagaaaaggatgactcataaacaagccatccctcagaatcagaacggtttcagagaattcaaagcagcaatttggtcagacagcatttatggacagaaaatggaaatgaggtacagaaaacagaagtgaggtacagagacagctctattggttgcagcctggcgtttgccgatttgaacagggtttcaacagttggctgcctgcaactaacagaagtgcagcagctgctactcagctatttattacaaaagtgtactcctaagttagccttagctcctaagttaggcttattcataaaataattttgcaattaaaactctcagaataaaatgagcaatttataaatttggccccaggatgcctctgtacctgagtgcttatgtaacaaactgcaacctaagttaggctttcagtagttgacgtactaagttaaattgcagtttgttacataaggagtcaggtacagaggcatctggggccaaatttataaactgttcactttattctgggtgttttttgtttgtttgtttttaaagtctcgctttgtcacccagcctggagtgcagtggcatgatctcagctcactgcaacctctgcctcccgggttcgagcaattcttccacctcagcctcctgagtagctgggattacaggcacccaccatcatgcccgactaatttttgtatttctgtagagacggggtttcaccatgttggccaggctggtcttgaactcctgacctctggtgatccacccgcttcggcctcccaaagtgctgggattatagacttgagccaccacacccagcctatctgggagttttaattgcaaaattattttattattggtctgtaaactgaaaaaaatacaggtagaagcaggtagggattcaattactgttttactcagactgacacacatcatggaatgattcctccttaaagaagagcaacctctattctgagtccatgaaacccccacctcacctaaggatgaccctgagcctcacagcaaccctgggatgctcatggtttctaaactccaatggagctgttcttagagatgacattattggttccattttgattctttcattgtgttttgtccactctatttaacagcttctttaaaagtgaatggaccttcccagcccatcctcgtcagagtgggagaagatatacagctaacctgttacctgtcccccaaggcgaatgcacagagcatggaggtgaggtgggaccgatcccaccgttaccctgctgtgcatgtgtatatggatggggaccatgtggctggagagcagatggcagagtacagagggaggactgtactggtgagtgacgccattgacgagggcagactgaccctgcagatactcagtgccagaccttcggacgacgggcagtaccgctgcctttttgaaaaagatgatgtctaccaggaggccagtttggatctgaaggtggtaggtaagaattctagatagatattttgtattcaatacctgctcctgccactttaatatgctagttcctggacaatttctctgacatttgaaattttcttaatgcttattcatcatcaaatttatatcaaatcctccagtgtgtgaaactgtcatagttacttaaaatccacaaactcaaatggatgaaatttaattatttgggcatataacttgtatcttttccagtatcttcaaaaattgaccatatctttaaggaaatctgagtatcttactacatattttacaaaaggctcattgtttcacagtgtgttattagaattctgagaaatgcaataaaattctagaaactgtaatcatctgaagactaaactggatccactgtgtaaaccaaaattataaatattgacagttttggcagggacaggggagaaaagatgaaatcactccctgcagcatcatttcccactgtccgtgtgtgtgagaattgaaacgtccaaggttagcagatgccattgagtacatataggcccaagtcttggatatgctacgtgtttctcccacggattttgattctaaattaataaacacgtttagccatgggagcgcatgttgagaagtttcatgagcctcgtattttctgccattggacgtagatatttataaggtttcgatttttgagaatatcctcctactccgtatgttaatcctgtccatgtgacccatgccctggccgaagttattttgttctcagggacagaataaatgttggatttgaacatttaccttacctcttaatcatcccagaatgatttaggaatacaaagaataaaaataagcaaacaaacaaaataagaaaatgctccagccagcctcatccctaagtggagtgcaatcccccttaagcttttctcccttccccaagccctccacatccccttctttcctcccagtgaaattgctgcccactcatccacttgaaaggaccccaggctttggttgctttctctgccccaggtctgggttcttccccactgatcactgtggaggggcaagaagatggagaaatgcagccgatgtgctcttcagatgggtggttcccacagccccacgtgccatggagggacatggaaggaaagacgataccatcatcttcccaggccctgactcaaggcagccacgggctgttccacgtgcagacattgctaagggtcacaaacatctccgctgtggacgtcacttgttccatcagcatcccctttttgggcgaggagaaaatcgcaactttttctctctcaggttggtgattccttatgttccttcaggtttggaaaataaatatgaagaccaactcagacttactcattgtattgctcttcttcctttgtgatttttatttgctgctctctgacgaggtctcctgctatcctctgcaaagctggttttcaggacacccagggattctactcctctgagtttctctctgacaccctcaactagcgccctgcaattatttttatcattggatacacactaaattctcgtaattgaccctgttttcactctctctctttaaattctcttcttctgatgtgaaaacaattaaattacagaactttgtgttttccccctcatggaggattttcttctggattagaaactgatttttattaataccatcttcatggttgcggcttgagtaattttatcctttcctcctcaagtcattccagtgattgtgtgatatagttggaagagagaagggaaaacttgtctgtgcatgtgtacatttctgagacgagcaaacatgaaatacttgcattctctcctctgcatctccagagcagggaggagcaggccaactgcttcctgggaggccaaattctctcccttctctccagcctagaagctgctcagatgaaaagtacaatcttaatattgtcccagtttcacagtttcaagggattcttgggtttccattttagagtccaggatgacgtttttgtggaaaacactgcttgtttggggattgcttcttgctgtggctgtaggcctgcccaggaagaggagctgaaaagaggtaagtcagggaaacagaaacagcggagcacactgcagtgggaaccgtactgcgtacttccccgagcctcccttttcacaagtcacctatgggaggcagtcagtgaatatccagtaactaaggaaacatgagaaacaggaaagcccagggcttatcatgcaatccaggctcagtgatgcatgaggtcagtgtttccacttgtaatagaagcaaaatgattaaaagataatgatttgatttcctgctgcccattccccagtgatctggttagggaagaagaagaaaaaagtgagtagtacagccatccttgttttcaaggctgagagctgaggttcactgagatttgttggcgtgaacaatttcctatgatctttaaaaatgtggtgacctacttgttggtgatttctgtgttgctggtgacttctcatgtgttagggaggctgttttgtgtgctctagaaagtgcttccactttaaatttcttatgtccgtgaaacacttgtcttcctgtttggctgttaatagaatgaaattatattgattaattatcagaatggattctctttctttacagtgaatgtgacattggcttcaaacacagctcacctgagactgatttcttctgaacagaacaagcgtgtgatccatggacattcaggcagccagatatcccacagagatctgactatctgctctatgggccagagggaactcctgtcagggagctggtactgagaggtggagactgggaacagggcgcgatgggtcccggaggttgccaagcacatgttgcaaagaaagagtcatctctgtgtcacctgacagtgagttttaggcaatggattgcaaaagaaatgagttctgggccatcccctctcttccaagccccatccccttgaaggtggcccctgaacaagtcagaatccccctgaccgtgcctctgaatacctctcctcttataacatgattggcaagtgccctatctacaccttccccaaaacttccttctctgggactctgcaccccgcttcattctttggttccctaatgtaggttctctggacattttttctgtacccacaagaacatctccaacgtatcaggaaaataacaatctgggattctggaaaccagaatgatattctgagtcctgatcatttctcatttctctaactgcttgaagggggctgccatgatcattgaagtactaactcaaggtgttttaattctactcaggaaaatctgctggagactgatcttttcagagacctatcctgttccaggttctctgagatccggcctatcaatcacaatctgacatctgataatcaaggacccttagaaaatcccatgggaaatacaatttagcctacaggaagaaatgaaaggaataatcaaggatttggtcagtttcttttttttttttttttcttttctttttttttttttttttctgagacaaagtctcactctgtcacccaggctggagtgcagtggcatgatctcagctgactgcaacctctgcctcccgggttcaagcaattctcttgcctcagtctcatgagtagctgggattacaggcatgtgccaccatgcccagcctatttttgtatttttagtagagatggggtttcactttgttggccaggctggtctcaaacttctggcctcaaatgatccactcgcctcggcctcccaaagtgctggaattacaggcatgagccaccacacctggcctgatcagtttatttaagatggtgacaattaattgtccacataggtggaactgagaaaataaaaaatatatatatacagttaaaaaaaagtgaaagaaaatacagctgcataagggggagaaaaatctgatcactaaaatataatcttgaaaatcttatgaagtgttgtaaaatccctcctccagactttttgagaaagttgatacaggaaattgagtcaggaaaaaaattttagactttccgatccaagcgaaaaattatgtatcatctatacgaacatgtcaattttattgttagagcaaaataaagtgcacaatttaaaattaataattataaaataaacaaatataagcagtacatgtaacacagtaaaaatattttaaagttataatgagttcaagaagataaactatatgtggaagacagaagaatgtcaacaagacttttggaaagaatgttatgaagtgagaagacgaggacctgctagtgacgctctgctgctctccaggatggcagacgtcagaggcatcgcggtcccatgcggatcactcatgaacagcactctgaacttgctcttctgggccatcatttttttttctatttttaaactcataaatttaaacacataaatgttagaaactacacattattcttccacaaatgtttacacattaattttaataaacatttttttcaattgtggtaaaatacataacataaaataaaaccctttaaccattttaaagtgtacagttctgtggtattgtatatgtgacattgctgtgtgaccatcatcatcactttctagttccagaatattttcatcgccctaaacgaaacttcatacccattaagcagttactacccatttttcaccccctactccccaggtaatctactttctgtccctatgaacttttctattctgaatattttatataaatggaaccataaactatctgtgtatgtgtatgtgtatgtggcttctttcccttagcctaatatttttagagttcttccatgtcatagcatgtatcagtgcttctttcctttttaaaaaaaaaattaacagacattatttttaagaacagttttagatttataacaaaataaaatggaaaatccagagagctcctagatccctcctctctcccccctatttctgctattattaacatcttacattagtgtggcacatttgttacaacccatgaaagaatagtgacacattattttcaactaaagtccacagttttacattaggttcaccttttgtttatataatctctggagtttaacaaatgatttttacatttacattgatctatctttatatttatgaagacttaaatttattagtaaatatactaggtttacctgaaaatattttaacactattttgatttaatgtaattaaaaataatttattgcacaacatctaaaggttaactattatttttcacttacttttgagtcttccttcctagtgaatgtagctctttgcttgttagtctgtgcttgtgaaggccctatgaatacatatattcactttccagggagaaagtctcaagaaaattggttttatcagtcacattctctcactgtatattagaaaacatactttcctatagcttcccaaattggtgattaatgtactttctgagttccagttccagttagaaaagccacaggaaggagaggggttggtggcgttgaggatgatgccccagtcactggaagtccctgtggctgttgggtgggtaatcgggttggtgcctcaggatacagttccctcccctcctggtgtgtagacagctgggtgtagtcattaaagtggggccactctcagaataaatgtgcagattggctggatctcagtttcagggagaggacaggaggaagccacagagactgaattgttaactccctgacattttcctcctttgtcagtacaatttaacttccatgaggacagtgatttttttccttcttgtctagccccacaacctgtaaaaatgacatacattgattatcaataaacatttgtaaaatgcatgaattgtctcataaagtgatatttattgaatatcttacctgttgaatgtactatgctaaggcctagagatacaatccttaataagacataattcctgccctcaggtctttcttttttgcagtggagtcactctgtttttggaatgtcttattataccttcataaactttactaaaaatgggagtgccagagtagtccagcaataaagaattaattgatgtagccaggtggtgaattcacttttccagaaaggataggctacttggagaccctgcactacttattgatttactcaaagctacaaatgaaaataagatggacactgttatccctgacaggtctaaagctctgagtccaatcaaccatccaccttcacgttttctaccatgtccacctgcagccactgctccccaatctctaagcttagaaggacaaacacccattaaaatgagtaaagaagtgacaagtttaagaatcttgttgtagaaaaaatatgaatttagactctgaaaaagagatagtaaaaactcctcttgaacctcatgctgaatgtcctaagtgtataaaaaagtaaaatgtctaaggctgaacctgttacatttcgtgttctataccacagttccaccccatttgttcctgttttgttgttacccccatgtttagggctcgcatgtccagaaatcccttctcatccaccatgtccatttgattataactattaatattttatcaccatttatttacctctgtcctgccttgattatttcttgatgaaatgtgtaagcctccctttagggtcagtgaaattaggactaggctctggcttgattcttcctggcttcgaatactgtctttgccacttagtgtgtgacgtgaaatttcaccaaggagatacatctacaggacagattgttagaggcacttgtggtttacagatctgcaaatactgtagaagaaaaactaaggggatctcttccatcatcaggaagaaagggttcatttaacagaagaagctcggccaggtgcggtggctcacgcctgtaatcccaacactttctgaggacaaggcgggtggatcacaaggtaaagagatggagaccatctgggccaacacggtgaaaccctctctcttatactaaaaatacaaaaattgtggtttccaggttcatccatgtccctacaaaggatatgaactcatccttttttatggctgcgtgggaattgaacaatgagaacacctggacacagggcggggaacatcacacaccagggtctgtcgtggggtgggaggagcggggagggatagcattaggagaaatacctaatttaaatgatgagttgatgggtgcagcaaaccaacatggcacatgtatacatgtgtaacaaacctgcacgttgtgcacatgtaccctagaacttaaagtattaaaaaaaatacaaaaattagctgggcgtggtggtacatgcctatagtcccagctactcaggaggctgaggcaggagaatcgcttgaacctgggaggtgcaggttacagtgagcagagatggtgccacagcactccagcctggtgacagagcgagactccgtcaaagaaaaaacaaacaaacaaacaaaaatacacaaacaaacaaaaagcaggagaagctcatattctatatccttgaagacaacttgatgataaacagctggagaagtcttacatgcagcaaggacaagggaaaccctcaacagtgggcagaacaggtcaggaagaaaaagaatgttaatgttagcaatgactcttggtacagatgtttctttatttctactttactgctttctctcctaaagtataaactgcaacattgactcctctttcattcacattctcacataggacacaattctggacttgctgaccagtgagaacttattaaagaaaagggctctttccttccagaaggcttgggctcctcctccaattatttacaattattcatgagccttctccgtcccttgtcaaagtccaagattagcagttgattgtacactagagcctgaagagcaaacacgctgagctattaaaggacttggacagattcctatgcatctccaacagtggtaatggaagtgagaattcactctactgcaatacttcccttcaaacgcctcccctcctccatatttgataacaaaaatagtaagaagagatttccctgtaaatgtagctttaaaattatatacttcaacacacactcagcatgaaaacagatgagaaatccatgaacttgtttggagttttcttgtgagaaatagttgctgcccacaaagagactgtatttccccaatagcagcaccggaggaaatctccctggacattttccagttctctcacttcactttctgcctcttcctctttgacagaaagtgaaatcacacctagtgaaactgacctactcaccatccaaggacagctttcctggtgaatgtacctagaagatgctccagtggagacagcagaggtgccaacacttcgctgcttattatgctaatagaacattagcttcctgggcaacatctctatcacaactcgttaaagaagttacaggggtaactggaaaagaatcaggacaattttcatgatgatctaagcagaaggtcacagatgtgccagcactctgaaggctagaataaggatggaaaatcccacagaaggtgattccagtaagagaatagatgtgggactaatcgacctcgttgtgaaaagacacgtctccagccttgctgtcctggaaaccttctagggggacagggaggctcctgacagagtctctgggcaggaagtgagagccatgacccttccttcttcacatgtcaccatgcagaaattcttctctggactttctacaaaccaccactctctcttcattgtgctgaacaaacacccagagctcatctcgttcctggtccaacttctgtccccattatttacttctacctcccagtaatgtctgtctcccctgtggtaaagtaatgtctcccctgtggtaaacccagaacactgaagatggttttggattccccttgtccttggtgtgtgggggcatcccagttcggggaacattctccgttgaagaagtgtatcttctaccctcagatcggatgaggttgggatgagctgcatctggatccagagaaacagccactgcatgtatagttggaaaaaaaaaaaaaaaaaaggaggaaagctgcaaatactgggaaggcagaatggagaaaaacaagagggagaaaactggaaggttaggtaaaactgtgttccgtcctaggagatacacgatgtgtaagtcctagaaggctagggttgggcaagatcttcagtaaccatctattccagccaggctaggactgtctagccaggatggctgtcacacctgaaagtgttccagggtaaggttttcaggatggggtcctgcctattcttcaaacgcctgttacgttattgcttgttcttaaaattaagtcctatagtatttccagtcatggtgtgtccactttcatttaagcctcttcattttcattttctgtgggtttatgtaataactgggccatccacttctcatacacctttatttctagtgattgaaatcccaggccttgtagtcaaaaagatctgaatcttgataattgctctttctttagtagctctgatcttggtgacgttaccttgcttctttcaggcacacctaactctcataataatgcaaataattatggcattcagcacaggactattgtgagaaataaatgagatagcgtatagggaacttaatactatgacttctctgtgatgaacacttggttcattttagcttccaatatttatagtaacactaatagcagaggtgatagtagcaatagtactaatactggtagtaactaatcttcttttcaaaccaaacatcctcagtaattaaaatttttctcataagaatttgtatttgtaaattagacctctccctctcctctccctctccctctccctctccccctccccctccccctccccctccccctccccctctccctctcttccctctccctctcccctttccacagtctccctctggactgtgctgctgccatctcggctcactgcaacctccctgcctgattctcctgcctcagcctgcccagtgcctgccattgcaggcgcgcgccgccacgcctgacgggttttcgtatttttttggtggagacggagtttcgctgtgttggccgggctggtctccagctcctaaccgcgagtgatccgccagcctcggcctcccgaggtgccgggattgcagacggagtctcgttaactcagtgctcaatggtgcccaggctggagtgcagtggcgtgatctcggctggctacaacctccacctcccagccgcctgccttggccccccaaagtgccgagattgcagcctctgcccggccgctaccccgtctgggaagtgaggtgcgtctctgcctggccgcccatcgtctgggatgtgaggagcccctctgcctggctgcccagtctggaaaatgaggagcgtctctgcccggccgccatcccacctaggaagtgaggagcgcctcttcccggccaccatcccatctaggaagtgaggagcgtctctgcccggccgcccatcgtctgagatgtggggagcgcctctgccccgccgccccgtctgggaggtgaggagcgtctctgcccggccgccccatctgagaagtgaggaacccctccgcccggctgccaccccgtctgggaagtgaggagcgtctccgcccggcagccaccccatccggaagggaggtgggggggtcagccccctcccggccagccaccccgtccgggaggtgaggggcgcctctgcccggccgcccctactgggaagtgaggagcccctctgcccggccagccgccccgtccgggagggaggtgggggggtcagccccccgcccggccagccgccccgtccgggagggaggtgggggagtcagccccccgcctggccagccgctcagtccgggagggaggtgggggggtcagccccccgccaggcgagacgccccgtccgggagggaggtggggggtcagccccccgcccggccagccgccccgtccaggagggaggtgggggggtcagccccccgcccggccagccacccggtccgggagctgaggggcgcctctgcctggccgcccctactgggaagtgaggagcccctctgcccggccagccgccccgtccgggagggaggtgggggggtcagtcccccgcccggccagctgccccatccgggagggaggtggggggtcagccccccgcccggccagccgcgccgtccgggaggtgaggggcgcctctgcccggtcgcccctactgggaagtgaggagcccctctgcccggcc

SEQ ID NO: 1118 - DNA, 1368 bp, Homo sapiens
atggtggattttccaggctacaatctgtctggtgcagtcgcctccttcctattcatcctgctgacaatgaagcagtcagaagactttagagtcattggccctgctcatcctatcctggccggggttggggaagatgccctgttaacctgccagctactccccaagaggaccacaatgcacgtggaggtgaggtggtaccgctcagagcccagcacacctgtgtttgtgcacagggatggagtggaggtgactgagatgcagatggaggagtacagaggctgggtagagtggatagagaatggcattgcaaagggaaatgtggcactgaagatacacaacatccagccctccgacaatggacaatactggtgccatttccaggatgggaactactgtggagaaacaagcttgctgctcaaagtagcaggtctggggtctgcccctagcatccacatggagggacctggggagagtggagtccagcttgtgtgcactgcaaggggctggttcccagagccccaggtgtattgggaagacatccggggagagaagctgctggccgtgtctgagcatcgcatccaagataaagatggcctgttctatgcggaagccaccctggtggtcaggaacgcctctgcagagtctgtgtcctgcttggtccacaaccccgtcctcactgaggagaaggggtcggtcatcagcctcccagagaaactccagactgagctggcttctttaaaagtgaatggaccttcccagcccatcctcgtcagagtgggagaagatatacagctaacctgttacctgtcccccaaggcgaatgcacagagcatggaggtgaggtgggaccgatcccaccgttaccctgctgtgcatgtgtatatggatggggaccatgtggctggagagcagatggcagagtacagagggaggactgtactggtgagtgacgccattgacgagggcagactgaccctgcagatactcagtgccagaccttcggacgacgggcagtaccgctgcctttttgaaaaagatgatgtctaccaggaggccagtttggatctgaaggtggtaggtctgggttcttccccactgatcactgtggaggggcaagaagatggagaaatgcagccgatgtgctcttcagatgggtggttcccacagccccacgtgccatggagggacatggaaggaaagacgataccatcatcttcccaggccctgactcaaggcagccacgggctgttccacgtgcagacattgctaagggtcacaaacatctccgctgtggacgtcacttgttccatcagcatcccctttttgggcgaggagaaaatcgcaactttttctctctcaggttggtga

SEQ ID NO: 1119 - protein, 455 aa, Homo sapiens [sequence omitted]

SEQ ID NO: 1120 - DNA, 21781 bp, Mus musculus
gctgctcatacaggacacccaaagctatgatgctggaatctatgtgtgcagggtggaggtgctaggcctgggcgtcagaatgggagacaggactcggctgctggtggagaaaggtgaggtggtgggagatcccccaagatgcagtgttactgggagttagggatggtcccctgctctgagctcccaaattccttcctctccaccgtctccacgtcctgctgtagggcctcctcagcaagcttccaacacagagcaagaggctcacacaagtctcctcctccgggctggattctacgccctcagctttctctctgtggccacgggcagtaccatctattaccagggcaaatgtgagttgctgagcaggggcaagggagcagaaatgggaggggacagattgcaagaggagaggaaagcttcaggcctgtaactctgagcagcccctgctatttctcctaggtccctgtcacatggaaatcatggacactcctcccgcagcctctgagaagtgattctaagtctcaatgatctagcactctcaggaggccaacaataagtccttacccgctcctctctcctacttaggactctcatattttcttcattctccagtctctctctctctctctctctctctctctctctctctctctctcacacacacacacacacacacacacacacacacatccctccacccttagctctcccttcctacccggggaccacaagctgtttactggctttctgcaggtgggagggtgagccatgggctggacacatatagagaagcctgatgcagaagtggggaaccagactttactagatgaccatagtgtgactgagcacgcacccagggcgaggagagcttttgggggcactcaagtgggtgtgctcctggcgatgcaggcatagtcagtgctgaggtcttctttcatgtctgtgatatcactactggacactggcagctgctggagagatgcatagtggggctcctgccctgagacctgggcctggcagtgcagaggatgatgtgaggaccaggggtactgtcacacatccttccccagcctggccgcagctcccacctgtctttctccctgtgtctccactcttttttttctcagtctctcctctttatatctcttgaacctgttttcgcttactttccctctttctttgtttctatataagtgtgtctgcctgtgttgtataggcccttaagtggatgtttggacatcaactttccaactgtttctacacattatttctatctatccatctatctattttgagacaaggtctctcactaaaactggagtttgccatttccactaggctggttggccagggagcccctagggcttgcctgtctgtaccccacagtactggggttccaggcacaagctaccatgcctgactacagcaaatactttctcagaacctcctctctcccccacctcctttatttactttatttatatgagtacactgtagttgtggtcagacacaccagaagagggtatcagattccgttacagatggctgtgagccaccatgtggttactgggaattgaactcagggcctctgcaagcacagccagtgctcttaactgctgagccatctctccaagctccaaacttcctcttctattgagacagggtctcatgtagctcaggctgaccttcaacttaatatgtagtgaaggacagactccctgcctctatgtgggatttcagtcacatgccagcgctctggttttatgctgcgctgggaatcaaacacagttctacacccgctggataaggactgttaactaaaccacactgctagccacgcccacgccccacccactttgcttttgttgttcttttgagacagggcggctcctctagtcctcatggaactcttctctctcgttttgtttgtttgttttttaatttcctctctcactcacttcctcctctctacgtccttctggagtgttttatattcttataaacacaccattccctccctctcttctggttgcctctttttctgcctctttcattttctcgttcctgctacttcctcttcccttttctctcggctccaccccttcatcccagccccactccctacgtgggtttccctcgtcccctcaccccctgcccgcacaccctcccacctccagcccccctccctcgcccccttgcccccagccgccacttccttccccgccccttcatctgctccacccctcacccttcccccttgtctcctcgtccccccagactcacattcctttccagtctcttcactagaagaaaaaaaaaatggttcagtaagaccccttccctgacccccccccccgccagaatggcaccccacattggctcatccatcctaggacagcacctctcattgaatctgctacctcagaatagcaccccaccccaggcccccaacgccagagcagcaggtctccaccccagaactgccttccacaacacacctactggagccccacccctccaacctcgctggttgccataggaaccacagccaaaacctgggtcttttggacaactctggccttttctagcagtaggaagggtgtggagggcaagctgtgggtgaccgagatgctctagggcttacctctctgactgaaccggcacaagcagatgaacaggatgatgacaagcaggaggaggagccctcccagtcccaggctcccatttagcaggaaatcatctggaaggagtatctctgagagggttttttttttccccaccaatttcccaacctcctggttaaatgtaagtttcctagcttcctatatttttcctgggtcccccttccccaattttttattttatcctatcttcctctccccgatcaatcctgttttctattttttgacaatttcatacatatataaaaagtctcagccgggcgtggtggcgcacacctttaatcccagcacttgggaggcagaggcaggcggatttctgagttcgaggccagcctggtctacaaagtgagttccaggacagccagggctatacagagaaaccctgtctcgaaaaacaaaacaaaacaaaacaacaaaaaaaaagtctcttggtcatttccaaagccctttctccctctcccccctcccaacccatgtctctcccacctttctgtcactttatgttgagagtctcatgtatcctgggaggccttagattctcctagtagccgagtatgcttgactttctgatcctcacacccctgtgtcgtgtcttaagtgctagcttggcaagagtgtactaccatggctgttttatgtggctctggggtcaaagccaggaccctgctatcctctcacagtttaaaatacaggaaaatatactctaggagattttgaggggggggcggtgttgtatttttgtattagtttttgtttgcttgttttgttttgtttttaaagacagggtttctctgtggagctctggctgtcctggaactctagaccaggctggtcttgatctcacacacagagatcctcctgcctctgtccgccatcccaacccctccggccctcttgccccctcactcccacctccccccactctgggattaaaggtgtgcaccaccactgcctggctttttttttttttctttctttctgcagtatcttctatagtttaggctgcttccaaatttcctgaagcctcatgcagagacaagtcatgtccttgatttctagtccttcggaccaccccacctctctggtgctgggattacaggagacactataacccagggcttcgtgcctacacattcattacccagacatatttgttacccagacttcaacttctcacttcctctagagattcacctaccgggttacctctcctgactatgctcactccctactgtttccgggtctcaggaggcccctcttccacctgtactgcctcattctgaccacttctcctaatcctgaaccctgcttttcttccctcactctccagccctcacatccctcccctttccgaacggaggggtccctacttactggttgtgcaattgttaccagatcccattgtcatcagacatagtccagggactgagaacaggcctgaaggtcaagactaaactaatccctcttctgctgggcttaatagcttgggttagtcacgtgcccccaagttccccatctctgaggcaaggggcccctttacagtcctcatcctcactgggctggggattttatgtttgtctttttctcttttttgtttttttggctttttttggagacagagtttctctgtgtagccctggctgtcctggaactcactctgtagaccaggctggtctcaaactcagaaatccacctgcctctgcctcccaagtgctgggattaaaggcgtgtgctaccactgcctggcttatgtttgtcttaacatattgtggtacccattttccaggccaggagcccgagattttaacaaggaaagcccaacgcagccctattggtagagatggatctctgtgagttcaagcacagccagagctacacagtgagaccctgtctcaagaagcgaacaaaagccggggcgtggtggcgcacgcctttaatcccagcacttgggaggcagaggcaggcggatttctgagttcaaggccagcctggtctacatagtgagttccaggacagccagggctatacagagaaaccctgtctcaaaaaaacaaacaaacaaacaaacaaaaaaaaacccaaaaaaataaagaagcaaaagccaagggagactcagaagtagcagagaaagtgtttagctgtattgccccctcccatttactctgccccaggctgatgggggtgggaaaggcagcggggggggggggcacttggaggaagctggaaacactgctcaatcctgaatgctggtgagagggctggtgaaggcaagggagccagggtctggagtagttgtgggaaccactgggaaaccagagagaagggtgccctttcccaggagggaggaccttatttggctggtgtggagtagtggctaccaagaatgctttaacttccccttgggtacttcctgccctttaactgctggttcctgtttgagggtagatagaggcccctcacttgagggacaacagcgtgaaactcagaacctcccagttataaggggcatgctgtaggtttgagggacccctgaggagctgtgatgaatcagggacagaacagattattattagtagttattattattagcagaattttgctatgtagcccaggctgacctgaggctcaccatcttcctgcctcagcctgcagagtatacggcgggccaccactttcagctgcagcttcttttctttggaaaatgaaggcacaagagctcagagggtagggtgtgaatgcagattccttcgggttcagggaactccaaatccatagtctggcctccatttatcccagcaggtttcccgtctcatcccggatctccacccactccccgctgacccagactcttggtttacagtggggacacattcaactgttcagagtggaaagaagctccccaccgcaggcattctgcccctcccgcagttttagcctctttccactgcctctgtgcctccttgcatctaggagaggaagaatagccattgggagatggtgttacatctttcctttgagattcctagatatcattagggtggttactccctcagccccagcctcccggttcaccctgtactggtaaaggaatgtccacctcctccaggggccccctctgcggtgccgccttaaggttcatcatcttgtggtttgtgcgtaggcatgggctcccagcacctcgagtgccagataactctggggtgtctcagggcacctctcttggtgtctggcagctatatgcagcaggatatcgatgtgctaccaaaggagtagggaagtcagaggtagtcagactaaatctgctaacagatgctgacaggaagtgggtgagagaagctgatgttagcaaagccttggggcatcaaggagaacttcccacagaaggcagcattctggcattggcaggagggcaggagggactgaggtgaaggtctctcagtgccactgtgaccaagagagaaaggggtgtagaagactacaccccaatctttgaacagagaggaagctggtagctaggatggagacagaggtgggtgagtctggtgcctgggtccctatgcatgttttgttaaccaaattcagggactttgtggtactccccccccagtgtttcccccagaacaaatggggatcacaatctaagtgggtttcttcttttttatagtttataattacattttttttaaaatttttaaacattgggtgaggagagagctctgttggtaaaagcactggccgcacaagcatgaagaactgagttcgagtccccagggcccacataaagatgggtgtggcaaccacttgtgaaagtccatgttcctagtatgagatgggagatgtggaaaactgagaattcaaggaagatcgcaggggatggggtgtccggcctagaatgttcagagaagatcgaaattagaccctgtctcagataaggtggtgggctggccggggttagcatttgacgtgactgtgaactcatactgaaaaacacacatgcgtgcacactcacacacacacacacacacacacacacacacacacatacacacacacacacacacacatacacacgcgcgcacaaaggtcaaacatctagaaaaactgaaccttacaacaaattcatatacatatatatcatatatatatttgaccaagccagctcagtcaatcaacagggtctcaagggagggagtgaagattgaaaagaaaaaggcaaagccaggcatggtggcacacacctttaatcccagcactcaggaggcagaggcaggtggatttctgagtttgagaccagcctggtctacaaagtgagttccagaacagccagggctacacagagaaaccctgtcttgaaaaaaaaaaaaacaaaacaacaacaacaacaacaacccccccccaaaaggtaattagacaaaactataacaagactccagcctgcactgaggctgaagcgggtttatttctctccagcctgctttgatatcattttaggtacataaaaacaaaaaaccaaaaaacaaacaaaaaaaccccccaaaaaaccatgggcagttcttagagcaaagacaaagtaatcaaatgaagtagtaaacaaggagatcacacaaggtaataattaagtaaaaaactaaaaacaaagccccatgacccctgtttctaatattcttatctgagcctacttccttgtccaagcccagtgacaagccaaattcctagaatcggcaccaaaagctctcagagctctcaatatgtgtgtgtgtggtgtgtattatataatttgtttttattttaaattatatttgtgtccatgtatgcatacaaacttgaatgcaaataccatcagaaaccagaagagggcgttggatcccctcaagctggagctataggttacctgactagggtgctggaacctgaactcaggccctctgcacgagctgcaagtgctcttaactgctgcaccatttcttcaggtcccataagcatagtcttagcacctagatcattggttctcaacccatgggtcccaaccccaccacacctcagacatcctgcatttgagacattgacactatgatttgtaacagttgcaaaaccacagttatgaagtagcaacaaggtaactttatggctggggggggggtcagcacaacatgagggactctattaaagcgttgcagcatcaggaagtttgagaaccactgacctagatctataagcaacactttgctggtcacatgcctccctctcctttgtttgttcagttttgtttaagatttatttattattatatataagtacactgaagctgtcttcagacacactagaagagggtgtcagatctcattacaaatggttgtgagccaccatgtggttgctgggatttgaactcaggaacttcagaagagcagtcagtgctcttaacagctgagccatctctccagcccctttgtttgtttgtttgggtttttgtttttgttttttttttgagacagggtttctctgtatagccctagctgtcctggaactcactctagaccaggctggccttgaactcagaaatccacctgcctctgcctcccaagtgctgggattaaaggcgtgcgccaccactgccctttgtttgttttcaagaccaggttttttctccctgtgtagccctggctgtcctggaatgtgctctgtagaccaagctggccttgaactctgatcagtctgcctttgcctcctaagtgaatgcatgttggttccttctttccttcttgagacaggttcttatgcatcccaacctggcctcacgcttgccaactagtgaaggatgaccatgggtttctgacggttctgctgggattacaggcccgcagcaccaagcctgcttgatttcgtgctggggacaaagccagggccctgggcatgcaaggccagtgctctcccatgaaccacagccctgagctacttctcatatctttccaggttgtgactattacctcatgttaccgctgaattgttcaagttagtctttgtttcctctttttttttccttgcctcaggaagacaaaatttacatctagtaaaatgtatgaagctggaattagttctgttttgcctgttacagaatcaaacctactagccaagtgccctgtcaggaaactctactgctatcccaacactgccttttcgtctctctgggcctcagcatcttcttagggctttcccatggagacgaagtggctagtgtaataaagactgtagttcagtggctagcacattcttggtgcctttggtcagtcagctgtattctactaatattggtgttggtaatattttccaaacgagttgtctggtctgggacatagagactgcaaggtcaccaggaaggggacatggcctgaaacctctgtccaccttcctccgacctgctcttccctaaactccaatcagctgcccctcgggtgccattaattcggttcctgatgttcattgaagtcaacaaatttctcattcattcattcattcattcatacattcatttgccctgtccctcatttataagtagttgatgcttcccaatggaggaggctcattctagacagactcccttaaggtggagtgtgcctctgtattgctttatcaggacagagagagagagagagagagagagagagagaggctgagcccccttcataaagccataaccactgcggacccacttaattctgcctttcccatctggttttagagactgaaacaggaagaagtcagccagtgtggggagagggtcgtatcagggacgcagacacacagccgacccttgttggcctcccactccatctcctcaccccccctcccgtgtgtgtgtgtgtgtgtgtgtgtgtgtgtgtgtgcgcgcgcgcgtgcgtgcgtgcatgcatgtgtgcaggtgcgtgtgtctttgcagccctcccttcagcactgtaaggtccagaagcatgaagaacacacgagatacttggagtcctacctggccatgacaaccttgtttgttgcctggccttctgcaagctcccttccttccctgggcttcatcttccctccctgccaagcccctcttcatctttaccttgaaaacctctctctaccccatctccttccccagttcagagaacccaggcatccagccacccaaccccggccccagcgctgggtaaacaggaagctgggtgaggggaggaagggtgttcggaaagtccccgggcagggggcaggtgtgtgggtctgcgggggtgggggggtctacccctgaggtatgaaagcccctgccccggtcctagttctgagtctggatggggacacggggactgcagggcctgggtgggagaccccaggggaggggctgcctcttgctggctgtggcaggagctacttccctggtgaccctgttgttggcagtgcctatcactgtcctggctgtgctggccttggtgccgcaggatcagggacgtcgggtgagtggctgcaacgggctccagagggctgcctcttgtgactgtttatttacttatggctgtgcttctgcccaccgcgctcagctggccgctctccccagagggaatgtctggtctgtctttgcctctccaggcaatcctagcctgaattttcaagccccttcctggttggcttcttttccagataacactgcacttgcgtctctctgcctgcatacatcgtctttgtttgttcttctagcaagatgcagtctagggaggacacagcaggcccaggccttggggctgggctctacggtgggaggggtggagttgccattagccaaatctgacctctgggcactctaaccctacctacccatccaggttgagaagatcattggctcaggagcacaggctcagaaaagactggatgacagcaaaccgtcgtgcatcttgccctcaccctctagcctctcagagactcctgacccccgtctgcatcctcagagatccaatgcttccaggaatctagcctccacatcccagggccctgttgcgcagtcctctcgggaggcatctgcatggatgaccatcctgtctccagctgcggattctacaccagatccaggggttcaacagctgccaaagggggaaccagaaactgacctcaaccctgagctccctgctgcccacctcataggtaagcatctggtagaccgaagagtgctggctatgtacccccacagtaagcgagagtcctttggctctgctatgacactactggtactttcccaactcctccaccaccaacttctccctcggtatgactgactgctcaggaaacaggtaaaaaccggcagggatctcgccactttagtcccttcgggtgatagatagcaccgttattcctgcccctccccgctaagtaccacagaaggaggaagaccccgctcctccgctccaggtccctgctcatcctgcccgggtctccgacctagagatcacggcccgagcgctcacgcgtgtccctttctgcaggcgcttggatgagtgggcaagggctcagctgggaggcgagccaagaagaagcgtttctgaggagcggcgcgcagttctcccccacccacgggctggcgctgccacaggacggcgtctattacctctactgccacgtcgggtacaggggcaggacgccccctgccggccgaagccgtgctcgctcgctcacgctgcgcagcgccctgtaccgcgcggggggcgcctacgggcgaggttcccccgagttgctgctggagggcgcggagacagtcacacctgttgtggaccccatcgggtacgggtcgttatggtacacgagcgtggggttcggcggcctggcgcagctccggagcggcgagagggtctacgttaacatcagtcaccccgacatggtggactacaggagagggaagaccttcttcggggcggtgatggtggggtgacagccatctgtattcattcctggaggatcgactgacggtgcgaatgtgtgaatcgtgatgtccgggaccccgacagtcccgagcggccgggggcgtggcgggggggggggagaacggaatgtaggacacgaattttgaaaataaagaatgtaaactatgccggcccttgccagtgtcttcacggaaatgcagacgtggtttttgattctgggacacgtgcaggtgtggctgacccagctttgaactgtggacacctgttgcacccacgtcctggctctaaggccagggctccaagagggcggaagaagggacaattaaaccctgagacttctgccagcaccctgattgccaggatgctgaaaggttagggaggttggttgaggtttgttagcagctgcgggtcggtcaaagaagaaacgaaaggaaagatattagactcacggattttcctaatccttatttctatcctatctagtgttagggggtgaaaccagggcgagaaagggtgggagaaagaatccacaaagtagcaaagacctggtccccacaagaccccctcacatacacccttgctcctggcttctgcctctgtgaggaggagccaacaggagaaggtaggcaggattcgttcccagagagaaaaactacaaagactgtggaacaaagctccgtgggttgggcccatcagttcagttgggcctgataggttatatgtatgtagtatgtatgtaatgtatgtatggatggatgtatgctctatctatctatctatctatctatctatctatctatctatctatctatctatctatctatctatctatagtccgggtctcatatatagtcctgggtcacctggaactctccagggctggggctaaaggcatggaccaccacgggttctgacagcccttctttaaggggcagcaggtcagtcgcaggcacgttaaggggcagactaatgaagaaagcaaaggagctgaaaatggcaggggtggggtgggggaggggattgtgtccgaggaggaggagttccaggaggaagccgatgccctggggtcctttctagaaatggaatgtcttcacctttggttcacacaaagttgggcaagtgggaggcccctacgatgagtaacagcagcccccccccccccacgccatggctggaggaggcagagggggacccaggcactatctaggtcaccccagtgggtcacccctaccccccaccccaccccagcataccacgtggttggtttttccctctctacacgggtgcaggaaggcccaaccaacaaagagcccactggggtttcattttctcttctcttctcttctcttctcttctcttctcttctcttctcttctcttctcttctcttctcttctcttttttaaaagatttatttatttattatatgcaagtacactgtagctgtcttcagacactccagaagagggagtcagaagacttgttacggatagttgtgagccacaatgtggttcctgggatttgaactcaggacctttggaagagcagttggtgctcttaaccactgagccatctctccagcctcttctcttctcttctcttctcttctcttctcttctcttctcttctcttctcttctcttctcttctcttctcttctcttctcttctcttctctcctctcctctcctctcctctcctctcctctcctctcctttcccttcccttcccttcctttcctcttcttttctctgttctttcttccttctttccctttttctcctcctcctccccctcctccccctcctcttcctcctcttcttccttctcttcctctctctcctcttccttctcccactgaccttgaagccctcaacaatttacctgcccctacctccgaagtgttgggattaaaagcatggctacacacccactccttatgtgctttggaccttctgcacagagccttccagtggggtgagagggtgaccaattttggctaaagtctagtcaggcttcagaatcttctatacctagtcattgccttccttgtaaaacctagttttcgtgaaaagccccattcagtcggtttagcaagctccctctcctagactggatcaccctcagtcatcccgtgcagcccctgaggtgatgtctgctcacctggcctgtctcaacaggcgtcttgtctgatctgtttagacaaagtccccctaccccggatttttctttcctcttagtcatttgccatccccctaacgcccaccctgctggggctcttaagacccacttgctctcattgaacactctacaacaagtctctgcaccaataactaattctgaataaagtcggccttgcctgcttcagcaagtactattgaataacaacaacaataaattattattattattattattattattattattattggtgttgggatcaaatccaagcctgcatatgtgattaagtaatttaaaaaccaacaacaacaacaaagcatttaaacaaggtgtttttctctttccaatccacccacctcaatacattcatcatttgtctgaaacactggaaaaccaaagccagcaatggctccttctttgttgtgttgctttgggttttgaattcagggtatcccatacactgagcatccaccctcaccccaacatgctccacagagtcacattttcagccctgtgtctttttaaaaactatttcactcatcttcagaggtttggaaaaataaaggggctggtgaccgaaaggcagagctggctgagcccagcccagcatggagcagggatagagcttaggtctcctctccgtggaccatgcccgctctgtctgttcagaggcaggttgaatggtgcagggtgcgcagttagacacctgaagctctgcggctcttccttggctgtgattcaggtgcctgagaatgtggctcctccccagccccatgggagccacaacagccggaaagaactgcagtactttcccagcaggtattggaattcccagagtgggaaattcccatgccccagggcaaaggtaattagggttaggctcctgtttccgggggagaggtagggatgttggctgccttttgttccacgggggtcttgggggtcttaatggcccaggggtataaagactgagatctggacccagagactttaggcctccgcaaagagatggatgcagacttcatcccaagacagaaatcacatttcttttccaagcgatctttatttctctcaatgacccgtagggcaattacagtcacggctcccgtggggagcagaggttcagtgatgtagcgacagcctggtcaccaaatcagcgttattaagacaattgggttagataaatattttgttttaaacataagcaaaagaggaggcaacaaggtagagaggccaggtggggacagctcagctccgttttcacagaaaacatgtctgtctgaagacagcttcccacactgggtcctccaggacaccccggccttccaaataaatacattcataagcaaataaataaataataaataaataataaataataagtgcaaatataaatagaggggggctggctctgtgaggaaggctgtgcattgcacctcagggaagagtctggaaaggtctgaaggtaggaaggcctgagatcttatccagcctcattctgagacagaggcaacctgaccactctccctttgcagaactcaggaatggacattcgaggctccagtgaattcggaaagcccatttgagtccttgatggtggtgcatgagaggcccacagtccaggtcactgtcccagcatcttgtgtttctgagtagttgttgaaagctctgagcacagagttggactctgagccataatcccctttctaagttagaaggacacagactgggggctctgaggagtagacaataaaggggtcagagtaaaggggtcagagtgggggctgggtagagaatggatgaacacccattcccttcacagagcaatgactccaaagtagacctgcccggactccgcaaagtctaagtacttgggcagattgacctcagcgctgagttggtcccccttctccagctggaagactcctcccaggtatatgggctcataccagggtttgagctcagccccctcaggggtgtccttggggcaggggctcttgacggcagagaggaggttgactttctcctggtatgagatagcaaatcggctgacggtgtgggtgaggagcacgtagtcggggcagccttgtcccttgaagagaacctgggagtagacaaggtacaacccatcggctggcaccactagttggttgtctttgagatccatgccgttggccaggagggcgttggcgcgctggctcagccactccagctgctcctccacttggtggtttgctgagggggggggggaggattgagtcagtgtcaccctcttagttcacactccacatcctgagcctcagcagctacccacacttcacttccggttcctgcaccctctgtctttccacatcccattggctatgaggtcccgggtggccccctgatgccttgcttttgagtcactgctctgactctcacgtgctgtctctaagagctctgtcttttctcagcctggctcgacacccctcaacccgccccccaaaatcatgccccttcattctcaaggcacatgtaaagaaatcttacctacgacgtgggctacaggcttgtcactcgaattttgagaagatgatcctggaggggaagagacaaaggcaaggatgagccttttaggcttcccagcaagcatctatgcacttagacccctttcctcccaaaccaaagctttaagttctccccccaccccatctcatcccatgcctaactgcccttcctccatcttaaattaagagagaggtgtgggaacacttactgagtgtgagggtctgggccatagaactgatgagagggaggccatttgggaacttctgtgtaggaaaagaaggaggttagttaagacagactcaccccaaaggagaagcctcccggctgattgccccgcttacagttcctctttgccccaccccaccccccagctttgtgtttttcttcttcattcattcatctgtccaacccacggcttctttctgcggtgccctctgtgcttgatctcccgttatctccccttcatcttcctccttatctctcatgcctctctcatttctgtctctgagttttatctcttgcttatcccctcttcccctggccacatctttccagatctctccacgtgtgaacacacttgttcgttcattcatctctctgtgcatccgacgaaggatgtttagtcagctggacgcatgggtccgaggtcctgactctgtcccctccacactctcctccaccttgccctgcccattagcccacttctttccctcacactgtccttcttgccctcctaacccgttttgcttgtgagcgagaataagggttgcccagacactcacctcatccctttggggaccgatcaccccgaagttcagtagacagaagagcgtggtggcccctgccacaagcaggaatgagaagaggctgagacataggcaccgcctggagttctggaagccccccatcttttgggggagtgcctcttctgccagttccacgtcgcggatcatgctttctgtgctcatggtgtcttttctggagggagatgtggcgccttgggccagtgagtgaaagggacagaacctgcctggttggctgcttgcttttctgggagctatttccaggatgttctggagtttctgttctccctcctggctagtcccttgctgtcctcgctgagggagcttctgctggctggctgtgcagacggccgcctttatagcccttggggaagagggcggggaaaagctctcattcaaccctcggaaaacttccttggtggagaaaaccatgatctcatgtggaggaagcggtagtggccctacacctctgtctcggtttcttctccatcgcgggggcagagggtttggaaagttggggacacccaggcatcaaggaatctcctccccgtcgtccccaccaggattctgtggcaatctggggccaatcaggagggtgtgtgtgtgtgtgtgtgtgtgtgtgtgtgtgtgtgtgtgttgtataggaccctgagaactgaaacccatttcttctctgtcctccagagctaatcattgtctgtttctttgtagaaagaccatgcctgtgtctatttccttttgatttctaaatgggacatccatgggggagaacttagcatgggggggtgcttctgaaagctgggtgcataaggggggagacatgatattgaggagggaaagccccctgtttgagttcttggaggaagtggctgaaggcagagcagcttgagagttgggaagtgtgcatgggctttgggagggctggtggggggggtaatgggatgagtatggggcagccccagagggaatgaactcagccctgggaattcacggacctcacaagccttctcctttcactctgatcatgagctcaggctgctgctttgggtccctgctcccaagtgagttttccacggagcctctgccatatcttgactgcggtacatcaactcagacatttaggtcccacagccctgcttccaggatttctcccaatccgtatgactccccggtcttccaaggattcccctcccccaccctcccactcctaaacactctcccaccctccagtggagtcacttctccccagaaccctcatctctctccacccttggatggatctccctagctcatcctttgggtctcctccggcagttaagctgcctcactcccgtgaatccaccatgtctctgggagctgcctgctcctcatgtctctttgctctgcccggatcccatggaccaactgaggcctctgtcccctgctccactccttaaagagaccaggaagtttctcccccaacgcaagacagacacaagcagacagaatctcagagaaaagaggtttattgggtttcacagatggtgcagggggtccctgtggatgtctagccaagcagtggctggcttttagagcttcgtgctttcttctagaaccccttggtcacccacatctaattctctcgccatctctctcttagatgggtcctgtctgaggtgagacacctttgtgtctgggacctagttgtcatctgacggctttctatttttcccctctttctattctctataaataaataacttaacttttctctccataaatagtcaaccttcccctgttcccagccacctctcccatgtctgtccctccttcatgtccaggtctctgtccgacctagacccacaaaaaccctgctctgtgcaggaacttctaggtaggcttgagtcgtcccctgagcatctggagtggccctggggaagatgtagtcccctgaagtgtctcagactcccgtgagagctccaggttattttagtggggaaggctggagactgtggggatgtgacccttgaaacaacggtcaggatggaggcctggaatccaattcttgggtttctttagaatctacagtgcaaaggctccaaagaatacactgctggggctgaagtgtagatgggagatgccgtcggtgtgggtggacagctggtctcccttactgagcaggaacacagccccctggtacattgagcgcacccacggtccttgaagtcccggatacacagacttctgcgcactgaggagaggcacatggaaggggtattgggaggaaaagagctggacctcgtgtgccaggtagatgggagtgggaatggccctgggggagcagctttctccagagaaaaccacctgggagtagacaaagtagaggccactggtggggatcaggagggagttgttgctcaaagagaagccatgtcggagaaaggcacgatccgtgcttgctctccagagcagtgagttctgcttgctggggtaccctgggaagaggcacaagacattggggggctatcaagatcagaggtccccatccctgagggagcaggcactggacaagtgggatggttggtagggagatgggagtggggtgcctgcccttaggggtaagaaaagttggtgtggggagatgggaagatcgcctgggcccctgggcaagtaggacaaaaggcagggactggacctctcctctggaggcagaagtttaccaacaaggtgagcagcaggtttcaggatgccatgggtcaagtgcttctgagggagtggatgggctgtcctggcagcggagaagcggacaccagagagtccctgggacagaagagagtggagaggactctaggactctgagttagctaggccaccccagcacccccaatctcttgctgcctcacctgggcccctagaggcagggccagcagcagccccaggaggaagacaggaggggtgccaagcaccctcaagaggtggagacggccgagcagtgtcatgtggagaacctgctgagagagagagagagagtgtgtgtgtgtagcggaggcggggcacacagcggaagacagaccttacctcccagctgagacagccaccctgagagacagggcgacagacagaaaaggggacaggcaggggaaccctgaagtgagcagggataaggagagacagaggggaagaggaaagctccaccatagaatcagacaatggctaacagaggcagagagagagaagagagagagagagagagagagagagggagagagagagagagagagagagagagagagagagagagagagagagagagagagactgataaggccgccacaggaacagaccaaaaatcaaagccacgacaggaggaccagacccattaaggctggggatccaggcaggttgtatagaaaaggctgtggctcaagaaaggaggtaggatcctgagggatgcctgataccagggtaagcccaaggagacagggtaggagaggctcacctgctgtgcggggtcctgggcgctggcgctcgggtccctttatagaggaagcggcagtgtggcaggcagcgggcgggttctaggtcggggctggggcttggggaagcccccagggcttagaagatgctgctgtttcagtcgaaggcaggaaaggctggggcctaggagagaaccgcaggctaagggcttagactactgcgttctgggaaagggagtcgggtccggggaactgtgggccgcagggactagcagggagctgggtcaggcccaggagttccagtgaacggccgagcaattcgtggagagggtgcagctgggctgtgactggaagcctggttccctgaagagtgatggtttatatcacttctgcacccttgactgctcacaggcttctctgcacatttccctctctgtcgatcatggtcatgtctggagggctccgaagccacatgtggttagcggcacctttgttttttcaggttcgaacccagggctctggatgcttgacatgcctgccgccccttcaggcctatttcctctcttgtctttgggggttcaagtcacagttattccaatatatctgtattttctggtcatctgccagtttttttttttttttttttttttttttgcttttttcgagacagggtttctctgtgtagccctggctgtcctgaaactcactctgtagaccaggctggcctagaactcagaaatccgcctgcctctgcctcccaagtgctgggattaaaggtgtgtgccaccactgcccagcttttttttttttttctgccagtttcatctgccagtttcatgtcaagaagttccattacagtgccctctccccaaatctggggcatcctggtgtgtaacaatcttaactgtgtccccttactctctggagcggcagttctcaacctgtgggcaaggtccctttggcaaacctctatttaaaacaaatatttacattatgattcataatagcagcgaaattacagttatgaaatagcaacgaaaataattgtatggttggggtcaccacaacatgaggaactgtattaaagggtcatggagttaggaaggttgagaaccctgtcctagaatgttccaggtctggaagatgatttgggggtattctcttagaaccccaagatc

SEQ ID NO: 1121 - DNA, 1077 bp, Mus musculus
atggggacacggggactgcagggcctgggtgggagaccccaggggaggggctgcctcttgctggctgtggcaggagctacttccctggtgaccctgttgttggcagtgcctatcactgtcctggctgtgctggccttggtgccgcaggatcagggacgtcgggttgagaagatcattggctcaggagcacaggctcagaaaagactggatgacagcaaaccgtcgtgcatcttgccctcaccctctagcctctcagagactcctgacccccgtctgcatcctcagagatccaatgcttccaggaatctagcctccacatcccagggccctgttgcgcagtcctctcgggaggcatctgcatggatgaccatcctgtctccagctgcggattctacaccagatccaggggttcaacagctgccaaagggggaaccagaaactgacctcaaccctgagctccctgctgcccacctcataggcgcttggatgagtgggcaagggctcagctgggaggcgagccaagaagaagcgtttctgaggagcggcgcgcagttctcccccacccacgggctggcgctgccacaggacggcgtctattacctctactgccacgtcgggtacaggggcaggacgccccctgccggccgaagccgtgctcgctcgctcacgctgcgcagcgccctgtaccgcgcggggggcgcctacgggcgaggttcccccgagttgctgctggagggcgcggagacagtcacacctgttgtggaccccatcgggtacgggtcgttatggtacacgagcgtggggttcggcggcctggcgcagctccggagcggcgagagggtctacgttaacatcagtcaccccgacatggtggactacaggagagggaagaccttcttcggggcggtgatggtggggtgacagccatctgtattcattcctggaggatcgactgacggtgcgaatgtgtgaatcgtgatgtccgggaccccgacagtcccgagcggccgggggcgtggcgggggggggggagaacggaatgtaggacacgaattttgaaaataaagaatgtaaact

SEQ ID NO: 1122 - protein, 306 aa, Mus musculus
MGTRGLQGLGGRPQGRGCLLLAVAGATSLVTLLLAVPITVLAVLALVPQDQGRRVEKIIGSGAQAQKRLDDSKPSCILPSPSSLSETPDPRLHPQRSNASRNLASTSQGPVAQSSREASAWMTILSPAADSTPDPGVQQLPKGEPETDLNPELPAAHLIGAWMSGQGLSWEASQEEAFLRSGAQFSPTHGLALPQDGVYYLYCHVGYRGRTPPAGRSRARSLTLRSALYRAGGAYGRGSPELLLEGAETVTPVVDPIGYGSLWYTSVGFGGLAQLRSGERVYVNISHPDMVDYRRGKTFFGAVMVG

SEQ ID NO: 1123 - DNA, 22173 bp, Homo sapiens
gacatggcctggatgctgttgctcatcttgatcatggtccatccaggtgacagggcgtgcgctcaggaccccaaggagtgtgggtgggaggagggagatccaggaggctggactagatgctatagggaacgggcttggtgggggctgaaacacacggctctgagggaggagtgggactgctccaaaggtgacactcagtggactcccccaattcacagtctctctgtgtcacccactgtgaggctttttagtttgagagatccaagtaaatctatgataaatttcttggtgaaacttttttttttttttttttgagactgagtctcgctctgtcgcctggctggagtgccgtggtgcgattttggctcactgcaacctctgcctcccatgttcaggtgattctcctgcctcagcctcctgagtagctgggactacacgcacgcacgaccacacctggctaattttttttttttttgagacggagtcttgctctgtcacctaggctggagtgcagtggcatgatcttggctcactgcaacctctgcctcctagattcaagcaattctcctgcctcagcctcctaggtagctgggattacaagcgcgcaccaccacacccaactaatttttgtatttttagtagagacagggttttaccatgttggccgggctggtcttgaactcctgacctcaggtgatctgcctgcctcggcctcctaaagtgcggggattacaggcctgagccactgcgcccagccatttttgtatttttagtagagatggggttttgctatgttggccaggttggtctcaaactcctgatctcaagtgatctgcctgcctcggtctcccaaattactggaattataggcatgagccactgcgcccgcctggtggtgaaactttttttttgagacagtttcattctgttgtccagtctagagtacagtggcggtatctcagctcactgcagcctccacctcctgggtaaaaatgattctcctgtctcagcctcccaagtagctaggattacaggtgcatgccattactgctggctaacttgtgtatttttagtagagacgaggtttcaccatgttggccaggctggtctcaaactcctgacctcaggtgatccactcgccttggcctcccaaagtgttgggattataggcgtgagccactgcacccggccgaaactgtttttaatgaactgagagaccttaactatcaggcatattattaactaaatgcaggagttctcaaaatgtggatttctgggaacctagaacaaattcttaggccccactccagacctactgagtcaaaaactcggggggtaggcccaggaatctgttctagcagatgctccaggtaatttccatacacactcaagtttgagaaccactgaaatagaatgacttgtaaatttccctaagtagataatttaatcagggattttaatatttggtttaattcatcaacatggacgggttaaataggaatctcaaccaattaaggccacgtcttcacctggagatttaattagttactttctttaacgaaaaccaagagtggctgggtgcactttgggaggccgaggcaggtggatcacttgagatcaggagtttgagaccagcctggtccgaggtgggtggatcacttgaggtcaggagtttgagaccagatggtgaaaccctgtctcgactgaaaatacaaaaattagccagtcgtggtggtgggtgcctgtagtcccagctacttgggaggctgaggcaccaggatcgcttgaacccaggggacggagtttgcagtgagccaagattgcaccactgcattccagcctgggcaacagagcaagaccccatctcaaaaaaagaaaaaagaaaaagaggaaggatggcttactgtacaatgccatttgtactaaaataatacctggataatataatgagtgatattagttaactaggcagctgcattcattaatgagcttaatttcaccatgatggtttacatttcagctagacaagttactactgaactggctggagaatgatggcagagggtgagagtgagagttggtataggaagaatttgaaaaatgatttttattttttattttttgagatggagtcttgctttgtcgcccaggctggagtgcaatggcgcaatcttggctcactgcaacctctgcctcccgggttcaagcgattctcctgcctcagcctcccgagtagctgggattacaggtgcacaccaccatgcccggctaatttttgtatttttttagtagagacggggtttcaccatgttggccaggatggtctcgatctcctgacctggtgatccgcccacctcggcctcccaaagtgctgggattacaggcgtgagccactgcacccagccgaaaaatgatttaataagcaatgttaagaaatcagattggttaagagggaagggtttaatgaggcacccaaagtatctattcccatgcaccctatgcctggagaaagctgggatgttctactccaagctctgttgtcttttctctttggaataactggggaggtgtttctctgggtcttccttctgcccccaggatcctgtgctctctgggtgtcccagccccctgagattcgtaccctggaaggatcctctgccttcctgccctgctccttcaatgccagccaagggagactggccattggctccgtcacgtggttccgagatgaggtggttccagggaaggaggtgaggaatggaaccccagagttcaggggccgcctggccccacttgcttcttcccgtttcctccatgaccaccaggctgagctgcacatccgggacgtgcgaggccatgacgccagcatctacgtgtgcagagtggaggtgctgggccttggtgtcgggacagggaatgggactcggctggtggtggagaaaggtgagatgctgggaggtggtgtctcctcctggctggaggccccaagaggcaatgtccttgggaggcagggatgctcctctgaggccccttccctccctgagcctgtgtgcacttcttccccaacccccgtctccattgccccatgcagaacatcctcagctaggggctggtacagtcctcctccttcgggctggattctatgctgtcagctttctctctgtggccgtgggcagcaccgtctattaccagggcaaatgtgagtaatggagccaggggcaatagtggacgggatgggaggggcagtaagagagtgggaggagggaggacagagaccaggaagaggagagcctcgggactgcaacactgagcagctcctgtcctctctctgaccaggccactgtcacatgggaacacactgccactcctcagatgggccccgaggagtgattccagagcccagatgtccctagtcctcttcaaaagaccccaataaatctgccccaccactaactcctcatgagtctcaagtgttttcttctccattctccagatgccaaatctactctctccggattcccccaactctgaactttcccttccaccaggtctgacctggaaaggtccaagaaggcagctgccggctgtggtcccagcgcccctcccaccaccatgtgggagctcagcacatctgcttcccccagtcccaggaggctgagcctgattgtcctgagaaatgggaaggatcagatatgactcctccttggcaactgccctttcctgccaggcccacacataccctcttctggctgttaggggagcttgggtccctgaacactgtcattcacccaataaattactatttgaccccagagtgggtggaagggtgagccatgtgttttttttattttaatttttaaaaaatttaaaaaattccctattcaaaggtcaaaaagccacataagttttgatgatgatcaatttgaacggaggctcgagatggactgagaggactgagacacagaagtggggggaccatggtttttactggctggaccacagggggaccctgtccacccgcctgggttgaggaaggtgtctggggtgctcaggtgggtttgttctcagcaatgcaggcatagtcagctcttggatcctccttggtgcctctcttgtctctgcccctgaggtcaggtccctcactgctgggcactggcagcctctgcagagatgcatagtggagttcctgctctgaggagccctgggcctgggaccaggacagaaggtgctgatgggaggcgatgccgtcagatccttccctgtgagttctgctcccacctccagcctttcttacttctctccctctctctctctctctctccctctctctctctctctctctctctctcttttttctttggagacagagtcccactatgttgtccaggattgtcttcaacccctgagctcaagctatcttcctgcctcagccttgcgatagctggaatgacagacgtgagccactgtgcctggttctggagcctctctctctctctctctttcattgctcttctctttgtgtctctctcactctcattttctccctgtctctcctatcctctgtctcactttttctcttggtttctgtctcattttctctttctcttttgcctcgattttctctgcctctctcatgctcctactttctctctccttgtctcccgtccccaaccctcctctcagcgctcagccatgcttctccccactcacccactcaggatctctcttgccctcccccttccctgtccccagactcacccagctcctctccagcctctttactggaagaaaagaagaagctcaacacagcccaccctttgtgcttctcccgggccctcccgggctccccccaccagcaggcgtggactcccctgttggcttcccagtggctccagggccaggcagtgttctgggaaagcagtgggaaagcgtgtgggggtgggggcacagggggcactgctgcagggggagggagggagtgcagcgctcacctcttcgatgcagccaacacaggcaggcggacagaaggaccactgccagaagcaggagcccgcccagccccaggcccccgtagatacatatatcttcagggaagagggctcaaggttaggaagcccattccttctccagcgtaccccagcctcctggttggttgcagctttctcagattccctctccaacagttttagaggcagaaaaatataccctcagagcttctccatcccagaccttaatacctcacctcttaccaggtttctgggcctcccgtgaggtccctttccctcctgtaccagctgtccccagaggcctgtccacctagtcatgagctgcatacatcactgttccccatcacttcctaagctcccaggactctctctatgcagatgcaagagacactttacttaccatcattccgcgataacattaggtcagggatcagggactggcctggaggtcaggaactctagtccttgctcttttaggcgaaatgatcaggggctggtgacttgcctcaagttcctcatctgtgaagtgaggggccctctgttataatcgttcccaggctggggagcctcccttatgtgccaaccctgagctgggcactttccattcctcactgctaatccccagaacatagggtatcatggtgcccgttgcccaagtaaagacccgagattcaagcctggactttactaggtcacccatcccagaaaggtggagctggggtttaaggccagctctgcccaactccagagcccagccctttcctctgccctgggctgaccacgtggtttggaggggacttttcagccctggatggttctaggtgctggtaaggggatgatggaggggaaggagcctgggcctgggtgggtgtgggcactggggggaagaagggagggtgatatcagcacacccagcaggtgggctgctccctgagccgcagagcagcgcgggagtgtgggggcccccttggctggtgtggagagctgcttcccacaggcagatgctgctagggctgaagtggggcatggaggagtatctggggccccataacttcccctcaggcacttcctcccctccaaccactggttcctgtttgagggtgaagagggggccgttctcttcaccccagagccagatatactgactagggtctggaaactgggacccttctgggtttaagaggaattctggggggtggggagcagaagtgcaggtggaggccataagggccgtgggcacagaaatgaattgtctttaatttctttggggagcagagactcagaggattcctcgacggcccagggaaactcaaacccatactctccctcccctcatcttagcttcaccccactctggggtgtgaccatccttccaccaaggtccctgcccattcccagcttacccagagcttgtggcctgcaggatggacagactccaaactggccagtgctgtctggctgaagagaagtgttgccacctcagacattcctgcccctcctctggctttaacttctcccccagcctgggttcctccccagcattgttaggagaggaagttcggctccagggttagggttacaacatctttcttttcaaacttctgggcctgtagctagggccataatctgcctcagctccagtcatttcactgatcctgccactagtcagcaaacacccaccaccttcaggtgtcttccttgattaactcttctctattacctcttacactgcatctgttgagacctcttgatcttggcatatgtctgtggacacatgtaccctgctccagttcagactgggagctctggcatatttggtgttctggtgacccacttggtgttctgcagctctatgcagcaggctgcttggctgtctgattaacaaacatgagagttaaaggcagccatactagatctacatgagccctgtggatagatcaaggacagaaagttggtgacaagttggtgacaggaaaggaggtgtgggcaatacaggtggacttcctgtaggaggcagcattctggcattgaacacagaactaagtaaaggcagcggcctgaggctctctggagagacctgggtgaaggcttcttagtggcactgtgatggagaaggagatgggtgctggaggattgcacacccactccttgaggagggtgaagactggggagcgcctgtaaggcaaggggtgaggaggagatgtggtgcctgggtgggtccatattaatttgcgtttccccttccaaattcaagaaccttctacttcctcccccacccttctccccatcctccatgttccccatgctgaataatattcagggttttttgtttgtttgttttgttttttttacattttattattaaaaagtgcaaacatagggtgaaatgagaataattgtacagtgaacatattcttaccacctagatgctactattaacattttttgttttgttttgtttttgagatggggtctcactctgtcactcagcctgaagtgcagtggtgaaatcatagctcactgcagccttgaattcctgggctcagaggtcctcccaccttagccttctgagtagctaggactacagacaccagctaccacatgaggctttgtagaaatggggtcttactatgttgcccaggctgattttgaactcctggtctcaagcaatctttccaccttagccttccaaagtgctggaattacaggagtgggccactgcacctggctctattaacattttttatttgctttatcacatatttatcaatccatctcacttttaaatatcttttaaaattacaaatatcagtacattttacatctaaacccttcagaagcttaacattgactggagttcagtatttatttccccatttcttttctggcctgaggaaggcaaattttacatacaaatctcaagtcagtactcttttttttttttgagacggagtcttgctctgttgcccaggctggagtccagtggtgtgatcttggctcactgcaacctctgccttctgggtacaagcgattctcctgtctcagcctcccaagtagctgggactacaggtttgtgccaccatatccagctaatttttgtatttttaatggagaaggggtttcaccatgttggccaggctggtctcaaactcttgacctcaagtgatccacctgccttggtctcctaaagtgctgggattataggtgtgagccatctcgcctggcctaatactgttttgtttgtttgtttttgtttttaagacagagtcttgttcttgtcacccaggctggagtgcaatggcatgatttcggctcactgcaacttccgcctcctgggttcaagtgattctcctgcctcagcctcccaagtagctggaattaaaggtgcctaccaccacgccccgctaatttttatatttttagtagagatggggtttcaccatgttgatcaggctgctctcgagctccttacctcagatgatccaccttccttggcctcccaaagtgctggtattataggcaagagccactgcgcccagccccagtattcagtttttaaactgtcttgttatcaaggctctggagccagatgcctgggttcaaattctggttctgccactgactctgtgagctccataagtttcttaacctctctgtacctcagtttcctcttagggtttttgtcaggattataattattggctgggcatgatggctcatgcttgtaatcccagcactttaggaggccaacacgggcagatcacgtgagtccaggagtttgagcccagcctgggcaatgtggcaaaaatccatctctacaaaaaatgcaaaaattagctgggcatggtggcatgtgcctatagtcccagctattcaggaggctgaggtaggtgaatccatagatcctgggaggtcaaggctgcagtgagccatgatcctgccattgcattccagtctgggtgacatagcgagaccctgtctcaaaaaaaaaaattattaaagtgtgtaaatcagtggcataaacatgttaagtgcattttgtgggtcagctatattattattagtattacggaaacacatagagatgttaccaagaaggggagatgattggagccacttccagcttccttggacctggtctttcttcccttgactctttttttttttttttttttttttttgagagagagagtctcagcctgttgcccaggctggagtgcaatggtgcaatcttggctcactgcaacctctgcctcccaggtttaagtgattctcctgcctcagcctcctgtgtagctggaattacaggcgcgtgccaccacgcccggctaactttttgtatctttagtagagacagggtttcaccatgttggccaggctggtctcgaactcctgacctcaagtgatccacctgcctcagcctcccaaagtgttgggattacaggtgtaagccactaccccggctactcccttgactcttaaccactcatgctgcctacatctaccattcatgtggtccttgctgctttgttttggttattcctgcatttatttgtccttttattcatttatgtataaacatttagtaagcacctactaatggatagggctcattgtagacttggaagctctctgagggtgggagtatgcctcgtccatctgtctttactttttgtagcaagggaggtaaagctccatttccatccctccttagtgagtcagtagtcagtggtgaggctaaggcttacctctccctttctcactcagcacagggggctggagatgagcaagggaacgggaggaggtcagcccagtatgggaatcagttcttctcagggaacccagacatccatccctcaagattccagtccttgtcctagtccggcccttgacctcagagacgggatcagctcttcctccagcacctaccttgagggtatagaagaatgcaaaccacattggaaacctggagatctgtgttctcatttcagctctgctgactggcttcctgcaagctaccttccctccctgggcctcagtttctctctctgctgagccagaagatgtctaaagacccctttggttccaccctgagagcctgtctccctaacctcaacttcttccccagttcagagaacccaggcatccagctgccccaccccagctctgggtaaacaggaagctgggtgaggggagcaggggtgtgcggaaagtcccagccaggtgtgcaggtctacagggagggggtgggcccgtccctgaggtatgaaagccccctgctctggctctggttcagtctcaatgggggcactggggctggagggcaggggtgggaggctccaggggaggggttccctcctgctagctgtggcaggagccacttctctggtgaccttgttgctggcggtgcctatcactgtcctggctgtgctggccttagtgccccaggatcagggaggactggtgagtggctgcaacaggccctggtggagagttgtatcttgcggatgcttggctccctctggttgtgcctgtggtcttttgccccctctggctcagctggctcggctgtccctggtggggatgtcttgtctctttgctgactctctttccatgttcctgtgatgttgtgcttgtgtcccgacataagccccttgtgtctcctctcctcttcccgaggtacatctgtttctccgcccaagtacctatgccttgcttgttctcccttctaaggaggtgtgtgttggggatggtgctggtaggagaaaccccaggcctgcagcttgggtccactttcagaggggtaggggtgacatgagctgaatctgaactctgggcactgtgaccccacccaaccaggtaacggagacggccgaccccggggcacaggcccagcaaggactgggtaagagcagactgtctctccttccccgcttcagaccctcaggggctcccagctccctgctgcgtccccagatacctcttcctctaggaatccaggctccccatccctgcgccctgttctctcaagggtagcctgcatgggtggctgccctgcccccaatcgtggactctttgccccttccagggtttcagaagctgccagaggaggagccagaaacagatctcagccccgggctcccagctgcccacctcataggtaaggacctccaagacctgaataagagtgtaaataatccgaaggttccagttctgctcgcccagagtccttcggctccatgattccagtgctcggtttcccacccgcttcacgaccttttgtcgctcgtgcccactcttacgctcgtccccgcagtgtagtttcttcttccctccggtgcaagcaaaagccggcctggaggtccccactacagcgttctgcaccccacatccgtgttccctcggcccccaactcgcactcatcccagaaacagcaccatccctcctcccccggcccggctcggctcccgcaggggctaaaagccgccacttccccagaagtcccaagcctttaggatcgcattcccaagagcgcgtcggcccgtgtctccgcaggcgctccgctgaaggggcaggggctaggctgggagacgacgaaggaacaggcgtttctgacgagcgggacgcagttctcggacgccgaggggctggcgctcccgcaggacggcctctattacctctactgtctcgtcggctaccggggccgggcgccccctggcggcggggacccccagggccgctcggtcacgctgcgcagctctctgtaccgggcggggggcgcctacgggccgggcactcccgagctgctgctcgagggcgccgagacggtgactccagtgctggacccggccaggagacaagggtacgggcctctctggtacacgagcgtggggttcggcggcctggtgcagctccggaggggcgagagggtgtacgtcaacatcagtcaccccgatatggtggacttcgcgagagggaagaccttctttggggccgtgatggtggggtgagggaatatgagtgcgtggtgcgagtgcgtgaatattgggggcccggacgcccaggaccccatggcagtgggaaaaatgtaggagactgtttggaaattgattttgaacctgatgaaaataaagaatggaaagcttcagtgctgccgataaagatgctgagttgcgacacacgtcttaattcagggtgggtgcacgggtgcgggttaaatattctcagtactcttctggttgcttgaaacaattcatcacaacacagtgtatggcctttgctcctagggatgatggtctgcctgtcccaccccctccctgcctctgaatggccaggccccaccattagcccagttggagggtgggaggaagggggacttctcaaactccgaagcttctctaggcatcctgattttcagggccacatggtcccaaccagactctgcaccatactcttttctcttgggtaccccccaacagtgagaggggtcattacagagcccagcaagcaccactcagaaaggcccagcagcagagtaagcccctatcatgacagaggaatgaagcctggaggggccccgcacttctccccctagagctgcctgaaggcctctctgtctcctacccgacagtcaactcttctcctccaaggagcttaattcaaggctcatggggtctgaagggaggaggctgaaggagaaagaaggggagaatattagagagagatggggatggcaggaaggagcctgtggtgcctgaaaacaccaggaagttctggggaggaggaaaaaccgatgccccacttagggtgtcccatttagggtgagacggaaaatcctcacctttttttcacactttaggtcccccttcccaaaagtgagtaagtgtgggtgcttctgggatgagtaacagtgtcccccattacttcatggctgactttcagccacaggctggaggaggcagagggtgacccaaggccctatctaggtcaccccaatgggtcaccctaccccctcagcctaccacatggttttctcctgcctggcaccccagggctggaggtaaagcctaatttccgaactcagtgggggctcccagtctaggggggctcaatttccgtctccatatttgtttttggaattattatttttttgagacagggtctcgttctgtcacccagacgggggtacagtggcatgatcatagcttactgtaacctcaaactcctgggcttgagtgatcctcctgcctcagcctcctgaggagctaggattacaggcatgcaccactacacctgactaatctttaattttttttctagaaacaaggtcttgctatgttgcacaggctggtcttgaactagtgggctcaagtggtcctcccacctcagcctcccaaagtgttgggataacaggcatgagccactgcgccccacccttatttgtctttgactctctccagaagagccttcatccagggagggggtgcttttctctttccggattacccacctctcacctctcccctccttcaccacaaagaccagtgggaccaagccggcatgtgagtccttcacccacatcttattcctatgtttcattcttttttaaaaaatagagacaggatctcactatgttgcccaggttgctctggaactcctgggttcaagcgatcctctcaccttggccttgcaaagtggtaggattacaggtgcatgccaccacgtccggcagttcggttccttgttctttattgtcctcagtctcttcgatttcacccactgagagaatggaaggggatagaacagctggaaactggttgaaggaagccagaattcactaagtgcccactgtgccaagggctgagtgaggtcctctgatggaggtcaggccttctctcacatgccctatgtgtggtggacattcctatccccattggatagataggttaagtggctggttcaggttgcagagttaggacagggtgatttgaagcctagacacccgaatctctggaagtcccttggctgtgtgattcaggtacctgagaatgcggctcctctccagctctctccggactgctggccagctgcaacagccggaaatctcacctgagctgcaggattttcccagcaaggattggaattcccagagttggaaattcccatgccctgagggagaggtaattaggttcaggctcttgtttcctgggggatggggaatattctgttgggctttgtttatgtagggtctccagggccctaggagtctaaggatgggactgggtccgagggatcttaaagcctgtggagagaggacttagggagcttcttcccacccacaagaagaggcagatgcagaattaattccaagaaggagaccatgtttcttttctaagcaaactttatttctcgccactgaatagtagggcgattacagacacaactcccctggggagcagaggctcagcaatgagtgacagttggtcaccaaatcagcattgtttagacaacttaatcagataaatattttaaaaaacataatcaaaagaaggcacagaggccagggggctacatgggaacagcctattgttcagctccgttttcacggaaaacatgtctgagccaaggcagctcctacattgggtcccccaggataccccggtctcccaaataaatacattcatctgtaaataaataaataataaataaataataaataatcacaagtgcaaacataaatagagggagctggctccatggggagggctgggctccgtgtctcaaggaagtctggaaacatctggagagaggaaggcctaaggtccacttgtgtcaatttctaggtgaggtcttctcaagtcctgcagcattctggccagaaccaaaggctccctggtctccagattccagatgtcagggatcaaagctgtaggccccagtgagttctggaggccccagtttgaattcttagtggttgccagcacttcactgtgcaggccacacattcctgaatcccaggtttcgaagtggtggtcttgttgcttaaagttctaagcttgggttccgaccctaagcccccaattctctttttgagccagaagaggttgagggtgtctgaaggagggggtaataaagggattggggcaggggaggcgtttgggaaggttggatgttcgtcctcctcacagggcaatgatcccaaagtagacctgcccagactcggcaaagtcgagatagtcgggccgattgatctcagcgctgagtcggtcacccttctccagctggaagacccctcccagatagatgggctcataccagggcttggcctcagccccctctggggtctccctctggcaggggctcttgatggcagagaggaggttgaccttggtctggtaggagacggcgatgcggctgatggtgtgggtgaggagcacatgggtggaggggcagccttggcccttgaagaggacctgggagtagatgaggtacaggccctctgatggcaccaccagctggttatctctcagctccacgccattggccaggagggcattggcccggcggttcagccactggagctgcccctcagcttgagggtttgctggagggagggagagagggagaggagagtcagtgtggccatgtcggttcactctccacatcctggccctcgagctctgcccaccccacatccggttcctgtcctctctgtctgtcatcccacatcccacctggccatgacgttctgagtatcccactaaggcctgtgctgttcctccacccttcccttgagctcagcgagtccttctcacattgtctccaagttctgcctaccatcagccgggcttcaatccccaaatcctagccctccaagttccaagacacatcctcagagctcttacctacaacatgggctacaggcttgtcactcggggttcgagaagatgatcctgaagaggagagagaaaagaaaaagctgagacccttaaacttcctagaaaatacccccctactttcacctccatccatcctcccccaagaccaaaactttaaatttcccccactgcttccataccggtactaaccctacccccaaacccaaacccagaattaggaaagaggtttggagacacttactgactgcctgggccagagggctgattagagagaggtccctggggaactgttggggagaaggagaatggttaacatcgagggagtcacccttaaaggaggaacagctggctgcctgtctggcctgcgctcttagccctgaggtgtctggttttctctctccattcatctgtgtattcaccttccaggcattcaacagctctttccctgagtgtcttctgtgtgccagacaccctatcttcttctctccttatctcccccatctctctccttagctgtcatatttcccgctctttctgtctcaccatctttattcatatcacttgtttcttcccccatctctcttctcacaccccacatctgtctccatatcttatttatatatctgcttgttcattcattcattcattcattcactccatacacacttagtgagcaccttccatgtgccagacatcctgtctctccatctttctctctctctcttccccatctcttgccacatctctttctgcatccccgtctttctccacgtttttttctctccatccctccctatcagcgcacatctttcacccatcccatctctctccctctcttgcgtctccatttccccttgggtgggagagtggatgaaggctggccaggcactcacctcttccctctgggggccgatcactccaaagtgcagcaggcagaagagcgtggtggcgcctgccacgatcaggaaggagaagaggctgaggaacaagcaccgcctggagccctggggcccccctgtcttcttggggagcgcctcctcggccagctccacgtcccggatcatgctttcagtgctcatggtgtcctttccaggggagagagggtggagccgtgggtcagtatgtgagaggaagagaacctgcctggcagcttgtcaggggatgtggcgtctgagggttgttttcagggggggtctgtagttgcttctctccctcttagctggtcctctgctgtccttgctgagggagcgtctgctggctgggtgtgccaacaactgcctttatatgtccctggggcgagaggagggcggggaaagaatcattcaaccagcggaaaacttccttggtggagaaacccatgagctcatctggaggaagcggtagtgggccctgcaccttctgtctcggtttcttctccatcgcgggggcggggatttggaaagttggggacacacaagcatcaaggatacccctcacactccccatcctccctgctccgattccgaggggggtcttctgggccactgactgatttgtgtgtaggaccctggaggctgaaccccgtccccatgcccctcaaaacctattgcctccatttcttttggggaccaggtctgtggtctgtttccttctaacttccagacaggatgcaggaaaaagatagaactagaactgggaggggcttcagaaagctgagtccttgagggagagaaaacggggttggagggaaaagctgtgttgagtcctgaggcctgtgtttgggtccctgcggggagaaggagctgggggcttggtggcaggcttgaggcctcaggaaaggctgggtgggggtagcagggacaagcctgggacagccccggggagtgaaatcacccccgggaattcacagaccccactggggcaggccttcttctttcattctgacccggagactcataatgctggtttcagtcttggcttccaaggaactctggggtccctgatttttttcatgaagctctcacttctcagggccccagtgtgtggccatatcttcttaaacgtcccctgtattccatacctggaggtcctggaggctctttcactccctggggccctctacatggccctgtcttcgttaagggggggtccccatactcgacttccatagccctggacattctcctacccattgctgtggtcacatctccccagaggtctcctgtaacccattcctcagagccgctacatgtggccatatctcccaggagctccctgacccccgcccctccagaccctgacttttccttcatcttctcagcttctcctttgcttcccctgcagcagtctggcggcctcacctggtgagtccatcacatatccctgaagctctctgagcccttatccttttgttctccccacagctcttgctccctttgagccctctgtccctccctccattccttagatagactgggaagttctcactcccagacacacacacacaagcagacagcatttcagagaaaagaggtttattgggcttcatcgagggtgcagatgcctccgtgtggggctctggtcggcagctggctttcagagcctttccctgccttctggggccctgtgatccctcatgcctacttctttctctcttggtcagccttgtgcgcatgccctctcactcttcatctcttgggcctgtctctgtttctccttggatgttcttctattattcccctctctccatcctccataaataaataatttaatttttttgccttcataaatagtcccctccctgcctctagtcatcccccaagctcctccatgtgcctgctcttcctctgtgtgtggatctaggccccacctagctggtgggacagaccaacagctttgggctgggaattcctaggcaggcttgaaatcctcagccagacagacatcagggatggttcagggaggtgtggtcccctgggatgcctagaattccttctttgaaagctccggtgacttgatcagggaagacttgagctgttggaatggccaaaggagaggtggtgacgacccctgaaatggtcagaatggaggcagaatggggagaaggtcttgaaatcaattattttttctttctggatttttccaagttctacagagcgaaggctccaaagaagacagtactagggctgaggactaggtgggggatgccatctgtgtgggtggatagctggtctccctgggtgagctggaacgcagccccgtggtacatcgagtgcagccagggttcctgcagccctggatacaccatcttctgggagctgaggagaggcacatggaaggggtactgggaggagaagagctggacctcatgggccaggtagagtggggaggaggtggccttgggagagtaggctttcccagagaagaccacctgggagtagacgaagtagatgccactggtggggaccaggagagaattgttgctcaaggagaaaccatcctggaggaaggcacggtccgtgtttgctctccagagcagtgagttctgcttgctggggtctcctaggaagagccataggggatgggggtgggagatcaggggtctggatcagaggtctcaatccctgaggaagtgggcactgaacaactgagttcctgggggatggcagggggaggcataggagtgggctccctctgttttttttagcgtgggggaagttgggggagaggggtggatgcttgggttcctgaggcaggggtaggaggagagctggtggggacatgtctgggaggtcaggtggatgtttaccaatgaggtgagcagcaggtttgagggtgctgtgggcaagatgcatcttggggtgctgacgggcagtctgggcagctgaaggtgtgaggccaacaccagggagcccctaggggagaacagagttgaggggggctctagggctcaaggtttggctgagccaccccagcagcccccattctcctgctgcctcacctgggccccaggcagcagaaccagcagcagccccagaaggaggaggtgtagggtggtgccacacacccttgggaggaagagacgttcaggtggtgtcatggggagaacctgcagagaaagagagagagagagagagacagtgagcggggcggggcacgcggcggaagacagacctcccgccctgggagacagcaccccccgacccccgagagagagatcgacagagaaggggacaagatgcagtcagagaaaccccaaggtgagcagagggagacagagagagacaggaagggaacagagaggaatcatggcagaaacagagaatgtgtgacagagacaatgagactgacagatggagagtcagagacagagaaggaaaccaaaaccaaacccaccaaggcccaggcccaggcaggccggggatccaggcagcaggtgcaggagggaccgaggcccaggcagagggcaggacactgctgggcggtagtccaaagcacgaagcacgggcagcccaaggagatggggcaggagagcctcacctgctgtgcggagcccctgggcccggacgctcaggtccctttatagaggaagcggcagtggcagcgtggcaggcagcgggcgggttctaggtcggggctggggcccggggaagcccccagggcttagaagatactgctgtttcagtcaaaggcaggaaaggctgaggcctaggagagaaccacaggctgggggttcaggcgactgagttctgggaaagggagtcgggtcaggggaatcgtgggctgggagggccagggagtggggtcaggcctagagttccaaagaagggacagtcaattcagagaggaggtggttgagcagctggggtgtgagctggaggcccggttccctgaagagcaatcatatataacatctctgcacccttggctgagtacaggcttctctctttgcccatttccttctcttgtacccctgtccttgtcccaaacaactcaaatcatacttgtcccagtatacggactttccagcccatctggcaggtttcacatcaagaaggtccattatatatccccttcatcggggacattctggtgtttgcctcttgtccaggtgaaaatattaatggatcccccttccactcttgaaagtgtcctagtttggaagataaattttttggtccccttactcagagatgatgctggacagtcaagtatgatgaggtctcatctcactcctgaaggatgccctccatctcttcctgacttcaggtggcttccacagaacagatttatataaccccaaataaacacacattccaggatcaatgtggcagacaccttccaaagttttctacaaaggaagtttcagaattccacatgggtgaggcttaagggtggtgacttagggtggggtggggacagctaagggacttgttctgaagctgcatttgcagagccaatacattattttaaaattgttccaggcctggtgcagtggctcacacctgtaatcctggcactttgggagtctgaggtgggcggattacttgaggtcaggagtttgagaccagctggccaacatggtgaaaccccatctctataataaatacaaaaattagccaggcgtgctggtgcgcatctgcagtcccagctactcgggaggctgaggctggagaattatttgaacctgggaggcggaggctgcagtgagtcaagatcgcaccactgtattccagcctgggggacagagcaagactctgtctcaaaaaaaaaaaaaaaaagtttccaaaatttttttcctttttattgatatgtaacttaggtatgaggtggacacctcttaagtgtacagctgatgaatttttccatctgtatgtagccaccacccagctccacgtattttcaggtccccagcaggttccctcatgccccctccctgctgataccctccaaagataaccaaccactctctcacttttatcaccatagattatttcctcctggtttggggcatcatataaatgaaatcacacagaatgtactcatttctgtttgacttctttcagtcagcattatgtttgtgagattcatatacgtggttgtatgtatcagtaatgtttttaaaaaaaattatgatgtaatattctattgtatcaatatattctaatatattctgttgatggggatttggtttgtttctagtttttgtctaacacaaaaaatgtctaacacgaacattctcatacatgagcccattttcacttagcttgcaagttacaaggtttaaaaaa

SEQ ID NO: 1124 - DNA, 900 bp, Homo sapiens
cagtctcaatgggggcactggggctggagggcaggggtgggaggctccaggggaggggttccctcctgctagctgtggcaggagccacttctctggtgaccttgttgctggcggtgcctatcactgtcctggctgtgctggccttagtgccccaggatcagggaggactggtaacggagacggccgaccccggggcacaggcccagcaaggactggggtttcagaagctgccagaggaggagccagaaacagatctcagccccgggctcccagctgcccacctcataggcgctccgctgaaggggcaggggctaggctgggagacgacgaaggaacaggcgtttctgacgagcgggacgcagttctcggacgccgaggggctggcgctcccgcaggacggcctctattacctctactgtctcgtcggctaccggggccgggcgccccctggcggcggggacccccagggccgctcggtcacgctgcgcagctctctgtaccgggcggggggcgcctacgggccgggcactcccgagctgctgctcgagggcgccgagacggtgactccagtgctggacccggccaggagacaagggtacgggcctctctggtacacgagcgtggggttcggcggcctggtgcagctccggaggggcgagagggtgtacgtcaacatcagtcaccccgatatggtggacttcgcgagagggaagaccttctttggggccgtgatggtggggtgagggaatatgagtgcgtggtgcgagtgcgtgaatattgggggcccggacgcccaggaccccatggcagtgggaaaaatgtaggagactgtttggaaattgattttgaacctgatgaaaataaagaatggaaagcttcagtgctgccgataaagatgct

SEQ ID NO: 1125 - protein, 244 aa, Homo sapiens
MGALGLEGRGGRLQGRGSLLLAVAGATSLVTLLLAVPITVLAVLALVPQDQGGLVTETADPGAQAQQGLGFQKLPEEEPETDLSPGLPAAHLIGAPLKGQGLGWETTKEQAFLTSGTQFSDAEGLALPQDGLYYLYCLVGYRGRAPPGGGDPQGRSVTLRSSLYRAGGAYGPGTPELLLEGAETVTPVLDPARRQGYGPLWYTSVGFGGLVQLRRGERVYVNISHPDMVDFARGKTFFGAVMVG
